(19) United States
(12) Patent Application Publication
(10) Pub. No.: US 2025/0269057 A1
(43) Pub. Date: Aug. 28, 2025

(54) THERAPEUTIC LAMA2 PAYLOAD FOR TREATMENT OF CONGENITAL MUSCULAR DYSTROPHY

(71) Applicant: UNIVERSITAT POMPEU FABRA, Barcelona (ES)

(72) Inventors: Marc GUELL CARGOL, Barcelona (ES); Avencia SANCHEZ MEJAS GARCIA, Barcelona (ES); Maria PALLARES MASMITJA, Barcelona (ES)

(73) Assignee: UNIVERSITAT POMPEU FABRA, Barcelona (ES)

(21) Appl. No.: 18/258,028

(22) PCT Filed: Dec. 16, 2021
(86) PCT No.: PCT/EP2021/086333

§ 371 Date: Jun. 16, 2023

(30) Foreign Application Priority Data
Dec. 16, 2020 (EP) 20214691.6
Nov. 22, 2021 (EP) 21209721.6

(51) Int. Cl. A61K 48/00; A61K 38/17; A61P 21/00; C12N 9/12; C12N 9/22; C12N 15/11; C12N 15/86; C12N 15/88; C12N 15/90

(52) U.S. Cl. CPC A61K 48/005; A61K 38/1709; A61P 21/00; C12N 9/1241; C12N 9/226; C12N 15/111; C12N 15/86; C12N 15/88; C12N 15/907; C07K 2319/80; C12N 2310/20; C12N 2740/15043; C12N 2830/50; C12Y 207/07

(57) ABSTRACT

The present invention relates to a composition comprising:
a) a first protein comprising or consisting of a site-specific DNA binding protein capable of binding and cleaving a target nucleic acid sequence; or a nucleic acid construct encoding said first protein;
b) a second protein comprising or consisting of a transposase; or a nucleic acid construct encoding said second protein; and
c) a nucleic acid construct comprising a transgene encoding laminin-α2 protein, or a functional variant or fragment thereof.

It also relates to the therapeutic use of this composition, to integrate a LAMA2 transgene into a specific site within the genome of a cell, in particular for the treatment of congenital muscular dystrophy.

### TECHNICAL FIELD

[0001] The present invention relates to a composition comprising a fusion protein comprising a site-specific DNA-binding protein fused to a transposase and LAMA2 transgene to integrate LAMA2 transgene into a specific site within the genome of a cell and its therapeutic use, in particular for the treatment of congenital muscular dystrophy.

### BACKGROUND

[0002] Congenital muscular dystrophy (CMD) is a class of severe early-onset muscular dystrophies affecting skeletal/cardiac muscles as well as the central nervous system.

[0003] Among CMD, laminin-α2 chain-deficient co-genital muscular dystrophy (LAMA2 MD), also known as merosin-deficient congenital dystrophy type 1A (MDCIA), is characterized by severe hypotonia, muscle weakness, skeletal deformity, non-ambulation, and respiratory insufficiency. There are milder forms of the disease with later-onset, with similar symptoms but wilder phenotypic variability.

[0004] There are currently no cure available for MDCIA. Current strategies in the clinic are focused on management (feeding supplementation, non-invasive ventilation support for respiratory insufficiency, and physical therapy for joint contractures, spinal defects, and other issues) (Nguyen et al., 2019. Appl Clin Genet. 12:113-130).

[0005] MDC1A is caused by loss-of-function recessive mutations in both copies of the LAMA2 gene coding for the laminin-α2 chain, one of the subunits of laminin-211. Laminin-211 is an extracellular matrix protein that functions to stabilize the basement membrane and muscle fibers during contraction. The laminin-α2 chain protein is 3 122 amino acid residue long, hence its coding DNA sequence (CDS) is ˜9.3 kb long. As with many other muscular dystrophies, MDCIA is therefore caused by mutations in a very large gene, surpassing the cargo capacity of AAV vectors or lentiviral vectors. Moreover, several tens of different mutations have been described so far in the overall LAMA2 gene, from single point missense, splice site or in-frame mutations to multi-kilobase region deletions (Oliveira et al., 2018. Hum Mutat. 39(10):1314-1337), so much so that a curative gene therapeutic approach is challenging, and gene replacement strategies are not available this far.

[0006] Other corrective gene-based strategies have been tested for MDC1A. Exon-skipping approach, which commonly refers to the use of synthetic antisense oligonucleotide to inhibit a splice enhancer site and prevent a particular exon from participating in splicing, was used (Aoki et al., 2013. Biomed Res Int. 2013:402369). However, this exon-skipping approach is not universal and can only be used with some patients that have a deletion, where the reading frame could be restored by skipping an additional exon adjacent to the deletion (Shieh, 2018. Neurotherapeutics. 15(4):840-848). Exon-skipping restores translation of truncated but partially functional proteins but does not recapitulate the benefit of the full-length laminin-α2 protein.

[0007] CRISPR/Cas9 was also used to correct LAMA2 mutation, in particular to excise the LAMA2 intron 2 region containing a splice-site mutation and creating a functional donor splice site, through non-homologous end-joining (NHEJ), leading to inclusion of exon 2 of the LAMA2 transcript and restoration of full-length laminin-α2 chain protein (Kemaladewi et al., 2017. Nat Med. 23(8):984-989). As exon-skipping, this strategy can only be used in some patients and is not universal.

[0008] However, NHEJ is not suitable for integrating large transgenes into a genome, and, while gene modification relying on the homology directed repair (HDR) pathway can theoretically correct the majority of pathogenic point mutations, it was found to be “extremely inefficient”, as explained by Kemaladewi & Cohn (2019. Emerg Top Life Sci. 3(1):11-18). In conclusion, Kemaladewi & Cohn called for the development of alternative strategies to correct mutations causing muscular dystrophy.

[0009] Finally, CRISPR/Cas9 was also used to induce gene expression, by using a catalytically inactive Cas9 (SadCas9) fused to a transcription activation domain, such as VP64, which is directed to the promoter of the LAMA1 gene, thereby allowing an increased expression of the structurally similar laminin-al chain protein (Kemaladewi et al., 2019. Nature. 572 (7767): 125-130). However, this approach needs a continuous expression of the transgene.

[0010] There remains thus a need to develop a permanent and efficient strategy for treating MDC1A, that is universal and not only limited to certain patients affected with certain mutations.

### SUMMARY

[0011] Gene replacement of the LAMA2 gene has promising therapeutic value; however, it has been challenging so far due to cargo size constrains. The Inventors used a fusion protein comprising a site-specific DNA-binding protein (e.g., Cas9) fused to a transposase (e.g., a hyperactive PiggyBac transposase) to integrate a healthy full-length copy of the LAMA2 gene into a specific site within the genome of a cell. The Inventors have thereby been able to provide a therapeutic payload with a large LAMA2 expression cassette (9.3 kb of the CDS) for ex vivo and in vivo delivery, compatible with different gene delivery technologies.

[0012] Hence, the present invention relates to a composition comprising a) a first protein comprising or consisting of a site-specific DNA binding protein capable of binding and cleaving a target nucleic acid sequence; or a nucleic acid construct encoding said first protein; b) a second protein comprising or consisting of a transposase; or a nucleic acid construct encoding said second protein; and c) a nucleic acid construct comprising a transgene encoding laminin-α2 protein, preferably of SEQ ID NO: 74, or a functional variant or fragment thereof.

[0013] In one embodiment, the first and second proteins of a) and b) are fused together, optionally through a linker.

[0014] In one embodiment, the nucleic acid construct of c) comprises a promoter selected from the group consisting of: CMV promoter of SEQ ID NO: 76, CAG promoter of SEQ ID NO: 77, EF1-alpha promoter of SEQ ID NO: 78, SV-40 promoter of SEQ ID NO: 79 and EalbAAT promoter of SEQ ID NO: 80. In one embodiment, the nucleic acid construct of c) comprises a splice acceptor of SEQ ID NO: 81. In one embodiment, the nucleic acid construct of c) comprises a poly(A) signal sequence, preferably selected from the group consisting of SEQ ID NO: 83-85 and/or an insulator element, preferably selected from the group consisting of SEQ ID NO: 86-87. In one embodiment, the nucleic acid construct of c) is flanked by inverted terminal repeats (ITR), preferably 5′-ITR and 3′-ITR of SEQ ID NO: 88 and 89.

[0015] In one embodiment, the nucleic acid construct of c) is comprised in a vector selected from the group consisting of: plasmid vector, a minicircle vector, a doggy bone DNA donor vector, a lentivirus vector and retrovirus vector.

[0016] In one embodiment, said site-specific DNA binding protein is RNA-guided nuclease comprising a Cas protein, and wherein said composition further comprises a guide RNA including a complementary sequence to a target nucleic acid sequence for integrating said LAMA2 transgene in a specific site of a genome of cell, preferably said Cas protein is S. pyogenes Cas 9 protein.

[0017] In one embodiment, the guide RNA comprises any one of SEQ ID NOs: 90 to 97.

[0018] In one embodiment, said transposase is a modified hyperactive Piggybac transposase or Sleepy Beauty transposase, preferably a modified hyperactive PiggyBac transposase comprising one or more amino acid mutations to increase excision activity as compared to unmodified hyperactive Piggybac, and one or more amino acid mutations to decrease DNA binding activity as compared to unmodified hyperactive Piggybac.

[0019] In one embodiment, said hyperactive PiggyBac transposase is a modified hyperactive PiggyBac transposase comprising at least one mutation of amino acid selected from the group consisting of: V34, T43, Y177, M194, R202, S230, R245, R275, R277, G325, S351, N347, R372, K375, R376, E377, E380, A411, D450, T560, S564, S573, M589, S592, and F594 preferably comprising mutations of amino acids Y177, R202, S230, R245, R275, R277, G325, N347, S351, E377, D450, R372 and K375, E377, T560, S564, S573, M589, S592, F594, said position number corresponding to the amino acid number of unmodified hyperactive Piggybac of SEQ ID NO: 9. In one embodiment, said hyperactive PiggyBac transposase is a modified hyperactive PiggyBac transposase comprising at least one mutation of amino acid selected from the group consisting of: M194, R245, R275, R277, G325, R372, K375, R376, E377, E380, D450 and S573, preferably comprising mutations of amino acids D450, R372 and R375, said position number corresponding to the amino acid number of unmodified hyperactive Piggybac of SEQ ID NO: 9.

[0020] In one embodiment, said transposase is fused N-terminally to said site-specific DNA binding protein by a linker, preferably a peptidic linker comprising GGS, XTEN or FOKI, more preferably XTEN of SEQ ID NO: 53.

[0021] In one embodiment, said composition is packaged within a nanoparticle.

[0022] The present invention also relates to an in vitro method for integrating LAMA2 transgene into a target nucleic acid sequence within the genome of a cell comprising introducing into a cell the composition of the invention.

[0023] The present invention also relates to an engineered cell obtainable by the in vitro method of the invention, wherein the engineered cell comprises a nucleic acid integrated within its genome, said nucleic acid comprising a transgene encoding laminin-α2 protein flanked by operational sequences for integrase and/or transposase mediated gene insertion.

[0024] In one embodiment, the operational sequences flanking the transgene comprise or consists of SEQ ID NO: 88 and 89.

[0025] In one embodiment, the inter-ITR size is at least 300 bp.

[0026] In one embodiment, the transgene encodes the full-length laminin-α2 protein.

[0027] The present invention also relates to a pharmaceutical composition comprising the composition of the invention, or the engineered cell of the invention, optionally in combination with one or more pharmaceutically acceptable excipients.

[0028] The present invention also relates to the composition of the invention, the engineered cell of the invention or the pharmaceutical composition of the invention, for use in therapy, in particular for use in the treatment of merosin-deficient congenital muscular dystrophy type 1A (MDC1A) in a subject in need thereof.

### Definitions

[0029] As used herein, the singular forms “a”, “an”, and “the” include the singular and the plural reference unless the context clearly indicates otherwise. Thus, for example, a reference to “an agent” includes a single agent and a plurality of such agents.

[0030] The terms “nucleic acid sequence” and “nucleotide sequence” may be used interchangeably to refer to any molecule composed of, or comprising, monomeric nucleotides. A nucleic acid may be an oligonucleotide or a polynucleotide. A nucleotide sequence may be a DNA, RNA, or a mix thereof. A nucleotide sequence may be chemically-modified or artificial. Nucleotide sequences include peptide nucleic acids (PNA), morpholinos and locked nucleic acids (LNA), as well as glycol nucleic acids (GNA) and threose nucleic acid (TNA). Each of these sequences is distinguished from naturally-occurring DNA or RNA by changes to the backbone of the molecule. Also, phosphorothioate nucleotides may be used. Other deoxynucleotide analogs include, without limitation, methylphosphonates, phosphoramidates, phosphorodithioates, N3′P5′-phosphoramidates and oligoribonucleotide phosphorothioates and their 2′-O-allyl analogs and 2′-O-methylribonucleotide methylphosphonates which may be used in a nucleotide of the disclosure.

[0031] The term “transgene” refers to an exogenous nucleic acid sequence, in particular an exogenous DNA or cDNA encoding a gene product. The gene product may be an RNA, peptide or protein. In addition to the coding region for the gene product (CDS), the transgene may include or be associated with one or more operational sequences to facilitate or enhance expression, such as a promoter, enhancer(s), response element(s), reporter element(s), insulator element(s), polyadenylation signal(s) and/or other functional elements. Embodiments of the disclosure may utilize any known suitable promoter, enhancer(s), response element(s), reporter element(s), insulator element(s), polyadenylation signal(s) and/or other functional elements, unless specified otherwise. Suitable elements and sequences will be well known to those skilled in the art.

[0032] The term “nucleic acid construct” refers to a man-made nucleic acid molecule resulting from the use of recombinant DNA technology. A nucleic acid construct is a nucleic acid molecule, either single- or double-stranded, which has been modified to contain segments of nucleic acids sequences, which are combined and juxtaposed in a manner, which would not otherwise exist in nature. A nucleic acid construct usually is a “vector”, i.e., a nucleic acid molecule which is used to deliver exogenously created DNA into a host cell.

[0033] The term “vector” or “expression vector” may refers either to an autonomously replicating vector, i.e., a vector that exists as an extra-chromosomal entity, the replication of which is independent of chromosomal replication, e.g., a plasmid, an extra-chromosomal element, a mini-chromosome, or an artificial chromosome, which may contain any means for assuring self-replication; or to an integrative vector, i.e., a vector that, when introduced into a host cell, is integrated into its genome and replicated together with the chromosome(s) into which it has been integrated.

[0034] The terms “sequence identity” or “identity” refers to the number (%) of matches (identical amino acid residues or nucleotides) in positions from an alignment of two polypeptide or polynucleotide sequences. The sequence identity is determined by comparing the sequences when aligned so as to maximize overlap while minimizing sequence gaps. In particular, sequence identity may be determined using any of a number of mathematical global or local alignment algorithms, depending on the length of the two sequences. Sequences of similar lengths are preferably aligned using a global alignment algorithm (e.g., Needleman and Wunsch algorithm [Needleman & Wunsch, 1970. J Mol Biol. 48(3):443-53]) which aligns the sequences optimally over the entire length, while sequences of substantially different lengths are preferably aligned using a local alignment algorithm (e.g., Smith and Waterman algorithm [Smith & Waterman, 1981. J Mol Biol. 147(1):195-197] or Altschul algorithm [Altschul et al., 1997. Nucleic Acids Res. 25(17):3389-3402; Altschul et al., 2005. FEBS J. 272(20):5101-9]). Alignment for purposes of determining percent amino acid sequence identity can be achieved in various ways that are within the skill in the art, for instance, using publicly available computer software available on internet web sites such as http://blast.ncbi.nlm.nih.gov/or http://www.ebi.ac.uk/Tools/emboss/. Those skilled in the art can determine appropriate parameters for measuring alignment, including any algorithms needed to achieve maximal alignment over the full length of the sequences being compared. For purposes herein, % nucleotide or amino acid sequence identity values refers to values generated using the pair wise sequence alignment program EMBOSS Needle that creates an optimal global alignment of two sequences using the Needleman-Wunsch algorithm, wherein all search parameters are set to default values, i.e., Scoring matrix=BLOSUM62, Gap open=10, Gap extend=0.5, End gap penalty=false, End gap open=10 and End gap extend=0.5.

[0035] The term “fusion” refers to a molecule in which two or more subunit molecules are linked. In some embodiments, the link between the two is covalent; alternatively, the link between the two can be non-covalent and rely, e.g., on intermolecular interactions. The subunit molecules can be the same chemical type of molecule, or can be different chemical types of molecules.

[0036] The term “fusion protein” refers to a hybrid polypeptide which comprises protein domains from at least two different proteins. For example, one protein domain may be located at the amino-terminal (N-terminal) portion of the fusion protein or at the carboxy-terminal (C-terminal) protein, thus forming an “amino-terminal fusion protein” or a “carboxy-terminal fusion protein”, respectively. In preferred embodiments, a fusion protein is a single chain polypeptide which may be fully encoded by a nucleic acid sequence, and includes at least two protein domains directly covalently linked by peptidic bound or optionally covalently linked via a peptidic linker.

[0037] The term “linker” refers to a chemical group or a molecule linking two adjacent molecules or moieties.

[0038] The term “binding protein” refers to a protein that is able to bind non-covalently to another molecule. A binding protein can bind to, for example, a DNA molecule (a DNA-binding protein), an RNA molecule (an RNA-binding protein) and/or a protein molecule (a protein-binding protein). In the case of a protein-binding protein, it can bind to one or more molecules of the same protein to form homodimers, homotrimers, etc.; and/or it can bind to one or more molecules of a different protein or proteins. A binding protein can have more than one type of binding activity. For example, zinc finger proteins have DNA-binding, RNA-binding and protein-binding activity.

[0039] The terms “Cas9” or “Cas9 nuclease” refer to an RNA-guided nuclease comprising a Cas9 protein, or a fragment thereof (e.g., a protein comprising an active or inactive DNA cleavage domain of Cas9, and/or the gRNA binding domain of Cas9). A Cas9 nuclease is also referred to sometimes as a casn1 nuclease or a CRISPR (clustered regularly interspaced short palindromic repeat)-associated nuclease. CRISPR is an adaptive immune system that provides protection against mobile genetic elements (viruses, transposable elements and conjugative plasmids). CRISPR clusters contain spacers, sequences complementary to antecedent mobile elements, and target invading nucleic acids. CRISPR clusters are transcribed and processed into CRISPR RNA (crRNA). In type II CRISPR systems, correct processing of pre-crRNA requires a trans-encoded small RNA (tracrRNA), endogenous ribonuclease 3 (rnc) and a Cas9 protein. The tracrRNA serves as a guide for ribonuclease 3-aided processing of pre-crRNA. Subsequently, Cas9/crRNA/tracrRNA endonucleolytically cleaves linear or circular dsDNA target complementary to the spacer. The target strand not complementary to crRNA is first cut endonucleolytically, then trimmed 3′-5′ exonucleolytically. In nature, DNA-binding and cleavage typically requires protein and both RNAs. However, single guide RNAs (“sgRNA” or simply “gNRA”) can be engineered so as to incorporate aspects of both the crRNA and tracrRNA into a single RNA species.

[0040] Cas9 recognizes a short motif in the CRISPR repeat sequences (the PAM or protospacer adjacent motif) to help distinguish self vs. non-self. Cas9 nuclease sequences and structures are well known to those of skill in the art. Cas9 orthologs have been described in various species, including, but not limited to, S. pyogenes and S. thermophilus. Additional suitable Cas9 nucleases and sequences will be apparent to those of skill in the art based on this disclosure, and such Cas9 nucleases and sequences include Cas9 sequences from the organisms and loci disclosed in Chylinski et al., 2013. (RNA Biol. 10(5):726-37), the entire content of which is incorporated herein by reference.

[0041] In some embodiments, a Cas9 nuclease has an inactive (e.g., an inactivated) DNA cleavage domain. A nuclease-inactivated Cas9 protein can interchangeably be referred to as a “dCas9” protein (for nuclease-“dead” Cas9). Methods for generating a Cas9 protein (or a fragment thereof) having an inactive DNA cleavage domain are known in the art (see, e.g., Jinek et al., 2012. Science. 337(6096):816-821; Qi et al., 2013. Cell. 152(5):1173-83, the entire content of each being incorporated herein by reference).

[0042] The term “zinc finger protein” refers to a protein, or a domain within a larger protein, that binds DNA in a sequence-specific manner through one or more zinc fingers, which are regions of amino acid sequences within a binding domain of the zinc finger protein whose structure is stabilized through coordination of a zinc ion. The term “zinc finger protein” is often abbreviated as “ZFP”.

[0043] The term “zinc finger nuclease” refers to an artificial restriction enzyme generated by fusing a zinc finger DNA-binding domain to a DNA-cleavage domain. Zinc finger domains can be engineered to target specific desired DNA sequences, and this enables zinc finger nucleases to target unique sequences within complex genomes. “Zinc finger nuclease” is often abbreviated as “ZFN” or “ZNP”.

[0044] The term “cleavage” refers to the breakage of the covalent backbone of a DNA molecule. Cleavage can be initiated by a variety of methods including, but not limited to, enzymatic or chemical hydrolysis of a phosphodiester bond. Both single-stranded cleavage and double-stranded cleavage are possible, and double-stranded cleavage can occur as a result of two distinct single-stranded cleavage events. DNA cleavage can result in the production of either blunt ends or staggered ends. In certain embodiments, fusion polypeptides are used for targeted double-stranded DNA cleavage.

[0045] The term “specificity” refers to the ability to selectively bind a sequence which shares a degree of sequence identity to a selected sequence.

[0046] The terms “insertion” and “integration” refer to the addition of a nucleic acid sequence into a second nucleic acid sequence or into a genome or part thereof. The terms “specific”, “site-specific”, “targeted” and “on-targeted” in relation to insertion or integration, are used herein interchangeably to refer to the insertion of a nucleic acid into a specific site of a second nucleic acid or into a specific site of a genome or part thereof. Conversely, the terms “random”, “non-targeted” and “off-targeted” refer to non-specific and unintended insertion of a nucleic acid into an unwanted site. The terms “total” or “overall” refer to the total number of insertions.

[0047] The term “mutation” refers to a substitution of a residue within a sequence, e.g., a nucleic acid or amino acid sequence, with another residue; and/or to a deletion or insertion of one or more residues within a nucleic acid or amino acid sequence. Mutations are typically described herein by identifying the original residue followed by the position of the residue within the sequence, then the identity of the newly substituted residue. Various methods for making amino acid substitutions (mutations) provided herein are well known in the art, and are provided by, for example, Green & Sambrook, 2012 (Molecular cloning: a laboratory manual (4th Ed.). Cold Spring Harbor Laboratory Press, Cold Spring Harbor, N.Y.). In preferred embodiments, the term mutation in a protein refers to an amino acid substitution.

[0048] The term “transposase” refers to an enzyme that binds to the end of a transposon and catalyzes its movement to another part of the genome by a cut-and-paste mechanism or a replicative transposition mechanism.

[0049] The term “modified” refers to a protein or nucleic acid sequence that is different than a corresponding unmodified protein or nucleic acid sequence.

[0050] The term “linker” refers to a chemical group or a molecule linking two adjacent molecules or moieties.

### DETAILED DESCRIPTION

[0051] The inventors used a fusion protein comprising a site-specific DNA-binding protein fused to a transposase to integrate LAMA2 transgene into a specific site within the genome of a cell.

[0052] The present invention relates thus to a composition comprising or consisting of:
[0053] a) a first protein comprising or consisting of a site-specific DNA binding protein capable of binding and cleaving a target nucleic acid sequence; or a nucleic acid construct, preferably a cDNA or an mRNA, encoding said first protein;
[0054] b) a second protein comprising or consisting of a transposase; or a nucleic acid construct, preferably a cDNA or an mRNA, encoding said second protein; and
[0055] c) a nucleic acid construct comprising or consisting of a transgene encoding the laminin-α2 protein, functional variant or fragment thereof.

[0056] In one embodiment, the composition comprises or consists of:
[0057] a) a fusion protein comprising or consisting of (i) a first protein comprising or consisting of a site-specific DNA binding protein capable of binding and cleaving a target nucleic acid sequence, and (ii) a second protein comprising or consisting of a transposase; or a nucleic acid construct, preferably a cDNA or an mRNA encoding said fusion protein; and
[0058] b) a nucleic acid construct comprising or consisting of a transgene encoding the laminin-α2 protein, functional variant or fragment thereof.

[0059] According to the invention, the first protein comprises or consists of a site-specific DNA binding protein capable of binding and cleaving a target nucleic acid sequence.

[0060] Current genome engineering tools, including engineered zinc finger proteins (ZFPs), transcription activator like effector nucleases (TALENs), and more recently, the RNA-guided DNA nucleases such as Cas9, effect sequence-specific DNA cleavage in a genome. This programmable cleavage can result in mutation of the DNA at the cleavage site via non-homologous end joining (NHEJ) or replacement of the DNA surrounding the cleavage site via homology-directed repair (HDR).

[0061] In one embodiment, the site-specific DNA binding protein is selected from the group comprising or consisting of RNA-guided DNA nucleases, zinc finger proteins and transcription activator like effector nucleases.

[0062] In one embodiment, the site-specific DNA binding protein is selected from the group comprising or consisting of RNA-guided DNA nucleases and zinc finger proteins.

[0063] In one embodiment, the site-specific DNA binding protein is an RNA-guided nuclease.

[0064] In one embodiment, the site-specific DNA binding protein is a Cas9 protein (e.g., without limitation, Streptococcus pyogenes Cas9 (SpCas9), Staphylococcus aureus Cas9 (SaCas9), or Campylobacter jejuni Cas9 (CjCas9); some other suitable examples will be described below), or a variant thereof (e.g., nickase Cas9 (nCas9) or dead Cas9 (dCas9)), a Cas12a protein, a Cas12b protein, a Cpf1 protein, or a CasX protein, including variants and functional fragments thereof.

[0065] In one embodiment, the site-specific DNA binding protein is a Cas9 protein, including variants and functional fragments thereof.

[0066] The CRISPR-Cas9 system is a highly effective tool for inactivating or modifying genes via sequence-specific double-strand breaks (DSBs). These DSBs are recognized by the cellular DNA damage response machinery and can be repaired by endogenous DSB repair pathways. The predominant repair pathway is non-homologous end joining (NHEJ), which often results in small insertions and/or deletions that can create frameshift mutations and disrupt the function of genes. This pathway can be exploited to generate genetic knockout mutations. Alternatively, in the presence of repair templates (such as, e.g., the nucleic acid construct comprising or consisting of a transgene encoding the laminin-α2 protein, functional variant or fragment thereof), the damage can be repaired seamlessly by homology-directed repair (HDR). However, despite remarkable progress, HDR-mediated genome editing to introduce precise genetic modifications is much less efficient than NHEJ-mediated gene disruption. Furthermore, large multi-kb replacements by the HDR pathways results challenging and requires selection and/or large population cell sorting. Consequently, the major applications for the HDR pathways are currently limited to the local replacement of key regions within genes, but not of large, full-length genes. As explained above, the present invention remedies this deficiency.

[0067] In one embodiment, the Cas9 protein comprises (i) an active DNA cleavage domain and (ii) a guide RNA binding domain.

[0068] Among the known Cas9 proteins, the S. pyogenes Cas9 protein has been widely used as a tool for genome engineering. This Cas9 protein is a large, multi-domain protein containing two distinct nuclease domains.

[0069] In one embodiment, the Cas9 protein is selected from the group comprising or consisting of the Cas9 protein from Corynebacterium ulcerans (NCBI Refs: NC_015683.1, NC_017317.1) with SEQ ID NO: 19); Corynebacterium diphtheria (NCBI Refs: NC_016782.1, NC_016786.1) with SEQ ID NO: 20; Spiroplasma syrphidicola (NCBI Ref: NC_021284.1) with SEQ ID NO: 21; Prevotella intermedia (NCBI Ref: NC_017861.1) with SEQ ID NO: 22; Spiroplasma taiwanense (NCBI Ref: NC_021846.1) with SEQ ID NO: 23; Streptococcus iniae (NCBI Ref: NC_021314.1) with SEQ ID NO: 24; Belliella baltica (NCBI Ref: NC_018010.1) with SEQ ID NO: 25; Psychroflexus torquisi (NCBI Ref: NC_018721.1) with SEQ ID NO: 26; Streptococcus thermophilus (NCBI Ref: YP_820832.1) with SEQ ID NO: 27; Listeria innocua (NCBI Ref: NP_472073.1) with SEQ ID NO: 28; Campylobacter jejuni (CjCas9) (NCBI Ref: YP_002344900.1) with SEQ ID NO: 29 (encoded by SEQ ID NO: 63); Neisseria meningitidis (NCBI Ref: YP_002342100.1) with SEQ ID NO: 30; Staphylococcus aureus (SaCas9) with SEQ ID NO: 68 (encoded by SEQ ID NO: 60); and Streptococcus pyogenes (SpCas9) (NCBI Ref: NC_017053.1) with SEQ ID NO: 31.

[0070] In one embodiment, when referring herein to the wild-type Cas9 protein, said wild-type Cas9 protein corresponds to Cas9 from Streptococcus pyogenes (spCas9) with SEQ ID NO: 31, unless specified otherwise.

[0071] In one embodiment, the Cas9 protein may be a “Cas9 variant”. A “Cas9 variant”, as used herein, is a protein sharing homology to a Cas9 protein as described herein, and includes fragments thereof.

[0072] In one embodiment, the Cas9 variant can be at least about 70% identical, at least about 80% identical, at least about 90% identical, at least about 95% identical, at least about 96% identical, at least about 97% identical, at least about 98% identical, at least about 99% identical, at least about 99.5% identical, or at least about 99.9% to a wild-type Cas9 protein with SEQ ID NO: 31, or to any other Cas9 protein with SEQ ID NOs: 19-30 or 68.

[0073] In one embodiment, the Cas9 variant comprises the amino acid sequence of a Cas9 protein with one or several amino acid substitutions. For example, the DNA cleavage domain of Cas9 is known to include two subdomains, the HNH nuclease subdomain and the RuvC1 subdomain. The HNH subdomain cleaves the strand complementary to the gRNA, whereas the RuvC1 subdomain cleaves the non-complementary strand.

[0074] Mutations within these subdomains can silence the nuclease activity of Cas9. For example, the substitutions D10A and H841A are known to completely inactivate the nuclease activity of the S. pyogenes Cas9 protein with SEQ ID NO: 31, resulting in a dead Cas9 (dCas9) that still retains its ability to bind DNA in a sgRNA-programmed manner. In principle, when fused to another protein or domain, dCas9 can target that protein to virtually any DNA sequence simply by co-expression with an appropriate sgRNA. In one embodiment, the dCas9 protein is encoded by a nucleic acid sequence having at least about 70%, at least about 75%, at least about 80%, at least about 85%, at least about 90%, at least about 95%, at least about 96%, at least about 97%, at least about 98%, at least about 99%, or about 100% sequence identity to SEQ ID NO: 59. In one embodiment, the dCas9 protein comprises or consists of an amino acid sequence having at least about 70%, at least about 75%, at least about 80%, at least about 85%, at least about 90%, at least about 95%, at least about 96%, at least about 97%, at least about 98%, at least about 99%, or about 100% sequence identity to SEQ ID NO: 67.

[0075] As to Cas9 nickase (nCas9), it is a variant of Cas9 nuclease differing by a point mutation (D10A) in the RuvC nuclease domain, which enables it to nick, but not cleave, DNA. In one embodiment, the nCas9 protein is encoded by a nucleic acid sequence having at least about 70%, at least about 75%, at least about 80%, at least about 85%, at least about 90%, at least about 95%, at least about 96%, at least about 97%, at least about 98%, at least about 99%, or about 100% sequence identity to SEQ ID NO: 57. In one embodiment, the nCas9 protein comprises or consists of an amino acid sequence having at least about 70%, at least about 75%, at least about 80%, at least about 85%, at least about 90%, at least about 95%, at least about 96%, at least about 97%, at least about 98%, at least about 99%, or about 100% sequence identity to SEQ ID NO: 65. In some embodiments, the SaCas9 nickase (SanCas9) is encoded by a nucleic acid sequence having at least about 70%, at least about 75%, at least about 80%, at least about 85%, at least about 90%, at least about 95%, at least about 96%, at least about 97%, at least about 98%, at least about 99%, or about 100% sequence identity to SEQ ID NO: 58. In some embodiments, the SaCas9 nickase (SanCas9) comprises an amino acid sequence having at least about 70%, at least about 75%, at least about 80%, at least about 85%, at least about 90%, at least about 95%, at least about 96%, at least about 97%, at least about 98%, at least about 99%, or about 100% sequence identity to SEQ ID NO: 66.

[0076] In one embodiment, the Cas9 variant comprises a fragment of Cas9, such that the fragment is at least about 70% identical, at least about 80% identical, at least about 90% identical, at least about 95% identical, at least about 96% identical, at least about 97% identical, at least about 98% identical, at least about 99% identical, at least about 99.5% identical, or at least about 99.9% to the corresponding fragment of a wild-type Cas9 protein with SEQ ID NO: 31, or of any other Cas9 protein with SEQ ID NOs: 19-30 or 68.

[0077] In one embodiment, the Cas9 variant comprises only one of a DNA cleavage domain or a guide RNA binding domain.

[0078] In one embodiment, an exemplary Cas9 variant is humanized Cas9 (hCas9) or a variant or functional fragment thereof. As used herein, the term “humanized Cas9” or “hCas9” refers to a sequence-optimized Cas9 protein for human cells.

[0079] In one embodiment, the hCas9 protein is encoded by a nucleic acid sequence having at least about 70%, at least about 75%, at least about 80%, at least about 85%, at least about 90%, at least about 95%, at least about 96%, at least about 97%, at least about 98%, at least about 99%, or about 100% sequence identity to SEQ ID NO: 56. In one embodiment, the hCas9 protein comprises an amino acid sequence having at least about 70%, at least about 75%, at least about 80%, at least about 85%, at least about 90%, at least about 95%, at least about 96%, at least about 97%, at least about 98%, at least about 99%, or about 100% sequence identity to SEQ ID NO: 64.

[0080] In one embodiment, the site-specific DNA binding protein is a cpf1 protein. In one embodiment, the cpf1 protein is encoded by a nucleic acid sequence having at least about 70%, at least about 75%, at least about 80%, at least about 85%, at least about 90%, at least about 95%, at least about 96%, at least about 97%, at least about 98%, at least about 99%, or about 100% sequence identity to SEQ ID NO: 61. In one embodiment, the cpf1 protein comprises an amino acid sequence having at least about 70%, at least about 75%, at least about 80%, at least about 85%, at least about 90%, at least about 95%, at least about 96%, at least about 97%, at least about 98%, at least about 99%, or about 100% sequence identity to SEQ ID NO: 69.

[0081] In one embodiment, the site-specific DNA binding protein is a CasX protein. In one embodiment, the CasX is encoded by a nucleic acid sequence having at least about 70%, at least about 75%, at least about 80%, at least about 85%, at least about 90%, at least about 95%, at least about 96%, at least about 97%, at least about 98%, at least about 99%, or about 100% sequence identity to SEQ ID NO: 62. In one embodiment, the CasX comprises an amino acid sequence having at least about 70%, at least about 75%, at least about 80%, at least about 85%, at least about 90%, at least about 95%, at least about 96%, at least about 97%, at least about 98%, at least about 99%, or about 100% sequence identity to SEQ ID NO: 70.

[0082] As will be further detailed below, certain aspects of the disclosure are also directed to vectors or plasmids (e.g., expression vectors, packaging vectors, etc.) comprising a nucleic acid construct encoding the site-specific DNA binding protein, in particular the RNA-guided nuclease, in particular any of the Cas9 proteins described herein; said vectors or plasmids being preferably suitable for expression in a host cell, e.g., mammalian cells, yeast cells, insect cells, plant cells, fungal cells, or algal cells.

[0083] In one embodiment, the site-specific DNA binding protein is a zinc finger protein (ZFP).

[0084] Zinc finger proteins are proteins that can bind to DNA in a sequence-specific manner. ZFP are unevenly distributed in eukaryotes. ZFP have been identified that are involved in DNA recognition, RNA binding, and protein binding. Certain classifications for zinc finger proteins are based on “fold groups” in view of the overall shape of the protein backbone in the folded domain. The most common “fold groups” of zinc fingers are the C2H2 or Cys2His2-like (the “classic zinc finger”), treble clef, and zinc ribbon. Representative motifs characterizing these proteins are disclosed in Table 1 of Li & Liu, 2020 (Int J Mol Sci. 21(4):1361), which Table is herein incorporated by reference.

[0085] The ZFP can be any ZFP, variant or functional fragment thereof, that can bind to a specific genomic DNA sequence in a genome. Non-limiting examples of ZFPs include ZFPs comprising a fold group or zinc finger motif selected from C2H2, gag knuckle, treble clef, zinc ribbon, Zn2/Cys6-like, or TAZ2 domain-like, or any combination thereof. In one embodiment, the ZFP is a C2H2 zinc finger protein.

[0086] In one embodiment, the ZFP is an engineered ZFP. Engineered zinc finger arrays can be fused to a DNA cleavage domain (usually the cleavage domain of FokI) to generate zinc finger nucleases. Such zinc finger-FokI fusions have become useful reagents for manipulating genomes.

[0087] The ZFP can comprise 2, 3, 4, 5, 6, 7, 8, 9, 10, 11, 12, or more zinc finger domains. The ZFP can comprise from 2 to 12, from 2 to 10, from 2 to 8, from 3 to 8, from 4 to 8, or from 5 to 8 zinc finger domains. In one embodiment, the ZFP comprises 6 zinc finger domains.

[0088] A common modular assembly process involves combining separate zinc fingers that can each recognize a 3-basepair DNA sequence to generate 3-finger, 4-, 5-, or 6-finger arrays that recognize target sites ranging from 9 basepairs to 18 basepairs in length. Another method uses 2-finger modules to generate zinc finger arrays with up to six individual zinc fingers.

[0089] In one embodiment, the binding domain of the ZFP can be engineered to bind to a sequence of interest. An engineered zinc finger binding domain can have improved binding specificity, compared to a naturally-occurring ZFP.

[0090] In one embodiment, exemplary nucleic acid sequences encoding the ZFP comprise or consists of SEQ ID NO: 32, SEQ ID NO: 34, SEQ ID NO: 36, or SEQ ID NO: 38. In one embodiment, exemplary amino acid sequences encoded by these sequences comprise or consists of SEQ ID NO: 33, SEQ ID NO: 35, SEQ ID NO: 37, or SEQ ID NO: 39.

[0091] In one embodiment, the ZFP comprises an amino acid sequence having at least about 70%, at least about 75%, at least about 80%, at least about 85%, at least about 90%, at least about 95%, at least about 96%, at least about 97%, at least about 98%, at least about 99%, or about 100% sequence identity to any one of SEQ ID NOs: 33, 35, 37 or 39.

[0092] In one embodiment, the ZFP does not have a Gal4 DNA binding domain. Gal4 binds to CGG-N₁₁-CCG, where N can be any base. This protein is a positive regulator for the gene expression of the galactose-induced genes such as GAL1, GAL2, GAL7, GAL10, and MEL1 which code for the enzymes used to convert galactose to glucose. It recognizes a 17-base pair sequence in the upstream activating sequence (UAS-G) of these genes. Therefore, Gal4 recognizes a short and very frequent sequence in the genome, thus not being site-specific. In one embodiment, the ZFP has a Gal4 DNA binding domain engineered to be site-specific.

[0093] As will be further detailed below, certain aspects of the disclosure are directed to vectors or plasmids (e.g., expression vectors, packaging vectors, etc.) comprising a nucleic acid construct encoding the site-specific DNA binding protein, in particular the ZFP described herein; said vectors or plasmids being preferably suitable for expression in a host cell, e.g., mammalian cells, yeast cells, insect cells, plant cells, fungal cells, or algal cells.

[0094] According to the invention, the second protein comprises or consists of a transposase.

[0095] Transposons are chromosomal segments that can undergo transposition, e.g., DNA that can be translocated as a whole in the absence of a complementary sequence in the host DNA. Transposons can be used to perform long-range DNA engineering in human cells. Common transposon systems used in mammalian cells include, without limitation, Sleeping Beauty (SB), which was reconstructed from inactive transposons, and PiggyBac (PB), isolated from the moth Trichoplusia. PiggyBac has higher transposition activity than SB and it can be excised scarlessly.

[0096] Native DNA transposons typically contain a single gene coding for a transposase protein, which is flanked by Inverted Terminal Repeats (ITRs) that carry transposase binding sites. During their transposition, the transposase protein recognizes these ITRs to catalyze excision and subsequent reintegration of the element elsewhere in a random manner. Moreover, some of these transposons can be adapted for use in gene therapy protocols, employing them as bi-component systems, in which a plasmid contains an expression cassette where a DNA sequence of interest (e.g., a LAMA2 transgene), placed between the transposon ITRs, can be introduced into a host genome directed by a co-transfected plasmid containing the sequence encoding the transposase enzyme or its mRNA synthesized in vitro. According to the disclosure, a transposon-based system is used to efficiently mediate stable integration and persistent expression of LAMA2 transgene in a cell.

[0097] In one embodiment, a transposase or modified transposase used in the present invention can be any transposase capable of inserting a LAMA2 transgene into a specific site of a genome.

[0098] Non-limiting examples of transposases include Frog Prince, Sleeping Beauty, hyperactive Sleeping Beauty, PiggyBac, and hyperactive PiggyBac.

[0099] In one embodiment, the transposase is a hyperactive PiggyBac transposase (hyPB).

[0100] The wild-type hyperactive PiggyBac transposase has an amino acid sequence comprising or consisting of SEQ ID NO: 9. An exemplary nucleic acid sequence coding this protein is as set forth in SEQ ID NO: 71.

[0101] In one embodiment, the transposase is a modified hyperactive PiggyBac transposase.

[0102] As used herein, “modified hyperactive PiggyBac transposase” refers to a transposase comprising one or more amino acid substitutions, typically no more than 1, 2, 3, 4, 5, 6, 7, 8, 9, or 10 amino acid substitutions, as compared to the wild-type hyperactive PiggyBac transposase with SEQ ID NO: 9. More specifically, a modified hyperactive PiggyBac comprises (i) one or more amino acid substitutions to increase excision activity as compared to the wild-type hyperactive PiggyBac transposase, and/or (ii) one or more amino acid substitutions to decrease DNA binding activity as compared to the wild-type hyperactive PiggyBac transposase. In one embodiment, the modified hyperactive PiggyBac transposase comprises an amino acid sequence at least 85%, at least 90%, at least 95%, at least 96%, at least 97%, at least 98%, or at least 99% identical to the sequence set forth in SEQ ID NO: 9.

[0103] In some embodiment, the modified hyperactive PiggyBac transposase comprises one or more amino acid substitutions, as compared to the wild-type hyperactive PiggyBac transposase, to increase excision activity.

[0104] In one embodiment, the modified hyperactive PiggyBac transposase comprises one or more amino acid substitutions to increase excision activity within regions defined by the amino acid position numbers [194-200], [214-222], [434-442] and/or [446-456], for example at amino acid positions D198, D201, R202, M212, and/or S213; numbering based on the wild-type hyperactive PiggyBac transposase with SEQ ID NO: 9.

[0105] In one embodiment, the modified hyperactive PiggyBac transposase comprises one or more amino acid substitutions to increase excision activity at amino acid positions selected from positions 450, 560, 564, 573, 589, 592, and/or 594; numbering based on the wild-type hyperactive PiggyBac transposase with SEQ ID NO: 9.

[0106] In one embodiment, the modified hyperactive PiggyBac transposase comprises one or more amino acid substitutions to increase excision activity at amino acid positions selected from positions M194 and D450; numbering based on the wild-type hyperactive PiggyBac transposase with SEQ ID NO: 9. In one embodiment, the one or more amino acid substitutions are selected among M194V and D450N, numbering based on the wild-type hyperactive PiggyBac transposase with SEQ ID NO: 9.

[0107] In one embodiment, the modified hyperactive PiggyBac transposase comprises one or more amino acid substitutions, as compared to the wild-type hyperactive PiggyBac transposase, to decrease DNA binding activity.

[0108] In one embodiment, the modified hyperactive PiggyBac transposase comprises one or more amino acid substitutions to decrease DNA binding activity at amino acid positions selected from positions 254, 275, 277, 347, 372, 375, and/or 465; numbering based on the wild-type hyperactive PiggyBac transposase with SEQ ID NO: 9.

[0109] In one embodiment, the modified hyperactive PiggyBac transposase comprises one or more amino acid substitutions to decrease DNA binding activity at amino acid positions selected from positions R275, N347, R372, K375, R376, E377, and/or E380; numbering based on the wild-type hyperactive PiggyBac transposase with SEQ ID NO: 9.

[0110] In one embodiment, the modified hyperactive PiggyBac transposase comprises one or more amino acid substitutions to decrease DNA binding activity at amino acid positions selected from positions R372, K375, R376, E377, and/or E380; numbering based on the wild-type hyperactive PiggyBac transposase with SEQ ID NO: 9. In one embodiment, the one or more amino acid substitutions are selected among R372A, K375A, R376A, E377A, and/or E380A; numbering based on the wild-type hyperactive PiggyBac transposase with SEQ ID NO: 9.

[0111] In one embodiment, the modified hyperactive PiggyBac transposase comprises one or more amino acid substitutions to decrease DNA binding activity at amino acid positions selected from positions N347, R372, and K375; numbering based on the wild-type hyperactive PiggyBac transposase with SEQ ID NO: 9. In one embodiment, the one or more amino acid substitutions are selected among N347S, N347A, R372A and/or K375A; numbering based on the wild-type hyperactive PiggyBac transposase with SEQ ID NO: 9. In one embodiment, the one or more amino acid substitutions are selected among N347S or N347A; numbering based on the wild-type hyperactive PiggyBac transposase with SEQ ID NO: 9.

[0112] In one embodiment, the modified hyperactive PiggyBac transposase comprises one or more amino acid substitutions to increase excision activity, as defined above; and one or more amino acid substitutions to decrease DNA binding activity, as defined above.

[0113] In one embodiment, the modified hyperactive PiggyBac transposase comprises at least one substitution to increase excision activity at position D450, and at least two substitutions to decrease DNA binding activity at positions N347, R372 and K375; numbering based on the wild-type hyperactive PiggyBac transposase with SEQ ID NO: 9; preferably said modified hyperactive PiggyBac transposase comprises the double mutations N347S and D450N or triple substitutions D450N, R372A and K375A; numbering based on the wild-type hyperactive PiggyBac transposase with SEQ ID NO: 9. In one embodiment, the modified transposase of hyperactive PiggyBac includes the double mutations N347S and D450N, said position number corresponding to the amino acid number of unmodified hyperactive Piggybac of SEQ ID NO: 9.

[0114] In some embodiments, the modified transposase of hyperactive PiggyBac does not comprise the triple mutations D450N, R372A and K375A, said position number corresponding to the amino acid number of unmodified hyperactive PiggyBac of SEQ ID NO: 9.

[0115] In one embodiment, the modified hyperactive PiggyBac transposase as disclosed in the previous embodiments further comprises at least one substitution in the region defined by the amino acid position numbers [158-169], for example A166S; and/or at least one substitution at position Y527, R518, K525 and/or N463; numbering based on the wild-type hyperactive PiggyBac transposase with SEQ ID NO: 9.

[0116] Typically, said modified hyperactive PiggyBac transposase comprises an amino acid sequence having at least 85%, at least 90%, at least 95% identity to the unmodified hyperactive PiggyBac transposase of SEQ ID NO: 1.

[0117] In one embodiment, said modified hyperactive PiggyBac transposase further comprises one or more of the following amino acid substitutions at positions selected from 34, 43, 117, 202, 230, 245, 268, 275, 277, 287, 290, 315, 325, 341, 346, 347, 350, 351, 356, 357, 388, 409, 412, 432, 447, 460, 461, 465, 517, 560, 564, 571, 573, 576, 586, 587, 589, 592, and 594; numbering based on the wild-type hyperactive PiggyBac transposase with SEQ ID NO: 9.

[0118] In one embodiment, said modified hyperactive PiggyBac transposase comprises one of the following amino acid substitutions or combinations of substitutions: V34M, T43I, Y177H, R202K, S230N, R245A, D268N, R275A, R277A, K287A, K290A, K287A/K290A, R315A, G325A, R341A, D346N, N347A, N347S, T350A, S351E, S351P, S351A, K356E, N357A, R388A, K409A, A411T, K412A, K432A, D447A, D447N, D450N, R460A, K461A, W465A, S517A, T560A, S564P, S571N, S573A, K576A, H586A, 1587A, M589V, S592G, F594L, D450N/R372A/K375A, R275A/R277A, K409A/K412A, R460A/K461A, R275A/R277A/N347S/K375A/T560A/S573A/M589V/S592G and R245A/R275A/R277A/R372A/W465A; numbering based on the wild-type hyperactive PiggyBac transposase with SEQ ID NO: 9.

[0119] In one embodiment, said modified hyperactive PiggyBac transposase comprises one of the following amino acid substitutions or combination of amino acid substitutions:
[0120] R372A/K375A/D450N,
[0121] R372A/K375A/R376A/D450N,
[0122] K375A/R376A/E377A/E380A/D450N,
[0123] R372A/K375A/R376A/E377A/E380A/D450N,
[0124] M194V,
[0125] M194V/R372A/K375A,
[0126] S351A/R372A/K375A/R388A/D450N/W465A/S573A/M589V/S592G/F594L,
[0127] R245A/R275A/R277A/R372A/W465A/M589V,
[0128] R275A/325A/R372A/T560A,
[0129] N347A/D450N,
[0130] N347S/D450N/T560A/S573A/F594L,
[0131] R202K/R275A/N347S/R372A/D450N/T560A/F594L,
[0132] R275A/N347S/K375A/D450N/S592G,
[0133] R275A/N347S/R372A/D450N/T560A/F594L,
[0134] R275A/R277A/N347S/R372A/D450N/T560A/S564P/F594L
[0135] R245A/N347S/R372A/D450N/T560A/S564P/S573A/S592G,
[0136] R277A/G325A/N347A/K375A/D450N/T560A/S564P/S573A/S592G/F594L,
[0137] V34M/R275A/G325A/N347S/S351A/R372A/K375A/D450N/T560A/S564P,
[0138] G325A/N347S/K375A/D450N/S573A/M589V/S592G,
[0139] S230N/R277A/N347S/K375A/D450N,
[0140] T43I/R372A/K375A/A411T/D450N,
[0141] G325A/N347S/S351A/K375A/D450N/S573A/M589V/S592G, or
[0142] Y177H/R275A/G325A/K375A/D450N/T560A/S564P/S592G;
   numbering based on the wild-type hyperactive PiggyBac transposase with SEQ ID NO: 9.

[0143] In one embodiment, said modified hyperactive PiggyBac transposase comprises one of the following amino acid substitutions or combination of amino acid substitutions:
[0144] K375A/R376A/E377A/E380A/D450N,
[0145] R372A/K375A/R376A/E377A/E380A/D450N,
[0146] M194V,
[0147] M194V/R372A/K375A,
[0148] R245A/R275A/R277A/R372A/W465A/M589V,
[0149] R275A/325A/R372A/T560A,
[0150] N347A/D450N,
[0151] N347S/D450N/T560A/S573A/F594L,
[0152] R202K/R275A/N347S/R372A/D450N/T560A/F594L,
[0153] R275A/N347S/K375A/D450N/S592G,
[0154] R275A/N347S/R372A/D450N/T560A/F594L,
[0155] R275A/R277A/N347S/R372A/D450N/T560A/S564P/F594L
[0156] R245A/N347S/R372A/D450N/T560A/S564P/S573A/S592G,
[0157] R277A/G325A/N347A/K375A/D450N/T560A/S564P/S573A/S592G/F594L,
[0158] G325A/N347S/K375A/D450N/S573A/M589V/S592G,
[0159] S230N/R277A/N347S/K375A/D450N,
[0160] G325A/N347S/S351A/K375A/D450N/S573A/M589V/S592G, or
[0161] Y177H/R275A/G325A/K375A/D450N/T560A/S564P/S592G;
   numbering based on the wild-type hyperactive PiggyBac transposase with SEQ ID NO: 9.

[0162] In a preferred embodiment, said modified hyperactive PiggyBac transposase comprises one of the following amino acid substitutions or combination of amino acid substitutions:
[0163] R372A/K375A/D450N,
[0164] S351A/R372A/K375A/R388A/D450N/W465A/S573A/M589V/S592G/F594L,
[0165] R245A/R275A/R277A/R372A/W465A/M589V,
[0166] N347A/D450N,
[0167] N347S/D450N/T560A/S573A/F594L,
[0168] R202K/R275A/N347S/R372A/D450N/T560A/F594L,
[0169] R275A/N347S/K375A/D450N/S592G,
[0170] R275A/N347S/R372A/D450N/T560A/F594L,
[0171] R275A/R277A/N347S/R372A/D450N/T560A/S564P/F594L,
[0172] R275A/325A/R372A/T560A,
[0173] R245A/N347S/R372A/D450N/T560A/S564P/S573A/S592G,
[0174] R277A/G325A/N347A/K375A/D450N/T560A/S564P/S573A/S592G/F594L,
[0175] G325A/N347S/K375A/D450N/S573A/M589V/S592G,
[0176] S230N/R277A/N347S/K375A/D450N,
[0177] G325A/N347S/S351A/K375A/D450N/S573A/M589V/S592G, or
[0178] Y177H/R275A/G325A/K375A/D450N/T560A/S564P/S592G;
   numbering based on the wild-type hyperactive PiggyBac transposase with SEQ ID NO: 9.

[0179] In one embodiment, said modified hyperactive PiggyBac transposase has an amino acid sequence selected among any of SEQ ID NO: 1-8, 10-18, 108-113, and 122-130.

[0180] In one embodiment, said modified hyperactive PiggyBac transposase has an amino acid sequence selected among any of SEQ ID NO: 1-8 and 10-18.

[0181] In one embodiment, said modified hyperactive PiggyBac transposase has an amino acid sequence selected among any of SEQ ID NO: 108-113.

[0182] In one embodiment, said modified hyperactive PiggyBac transposase has an amino acid sequence selected among any of SEQ ID NO: 122-130.

[0183] In one embodiment, the modified hyperactive PiggyBac transposase can comprise one or more substitutions relative to the wild-type hyperactive PiggyBac transposase that are involved in the conserved catalytic triad, e.g., at amino acid 268 and/or 346 (e.g., D268N and/or D346N); numbering based on the wild-type hyperactive PiggyBac transposase with SEQ ID NO: 9 or on the modified hyperactive PiggyBac transposase with SEQ ID NO: 11.

[0184] In one embodiment, the modified hyperactive PiggyBac transposase can comprise one or more substitutions relative to the wild-type hyperactive PiggyBac transposase that are critical for excision, e.g., at amino acid 287, 287/290 and/or 460/461 (e.g., K287A, K287A/K290A, and/or R460A/K461A); numbering based on the wild-type hyperactive PiggyBac transposase with SEQ ID NO: 9 or on the modified hyperactive PiggyBac transposase with SEQ ID NO: 12.

[0185] In one embodiment, the modified hyperactive PiggyBac transposase can comprise one or more substitutions relative to the wild-type hyperactive PiggyBac transposase that are involved in target joining, e.g., at amino acid 351, 356, and/or 379 (e.g., S351E, S351P, S351A, and/or K356E); numbering based on the wild-type hyperactive PiggyBac transposase with SEQ ID NO: 9 or on the modified hyperactive PiggyBac transposase with SEQ ID NO: 13.

[0186] In one embodiment, the modified hyperactive PiggyBac transposase can comprise one or more substitutions relative to the wild-type hyperactive PiggyBac transposase that are critical for integration, e.g., at amino acid 560, 564, 571, 573, 589, 592, and/or 594 (e.g., T560A, S564P, S571N, S573A, M589V, S592G, and/or F594L); numbering based on the wild-type hyperactive PiggyBac transposase with SEQ ID NO: 9 or on the modified hyperactive PiggyBac transposase with SEQ ID NO: 14.

[0187] In one embodiment, the modified hyperactive PiggyBac transposase can comprise one or more substitutions relative to hyPB that are involved in alignment, e.g., at amino acid 325, 347, 350, 357 and/or 465 (e.g., G325A, N347A, N347S, T350A and/or W465A); numbering based on the wild-type hyperactive PiggyBac transposase with SEQ ID NO: 9 or on the modified hyperactive PiggyBac transposase with SEQ ID NO: 15.

[0188] In one embodiment, the modified hyperactive PiggyBac transposase can comprise one or more substitutions relative to the wild-type hyperactive PiggyBac transposase that are well conserved, e.g., at amino acid 576 and/or 587 (e.g., K576A and/or I587A); numbering based on the wild-type hyperactive PiggyBac transposase with SEQ ID NO: 9 or on the modified hyperactive PiggyBac transposase with SEQ ID NO: 16.

[0189] In one embodiment, the modified hyperactive PiggyBac transposase can comprise one or more substitutions relative to the wild-type hyperactive PiggyBac transposase that are involved in Zn²⁺ binding, e.g., 586 (e.g., H586A); numbering based on the wild-type hyperactive PiggyBac transposase with SEQ ID NO: 9 or on the modified hyperactive PiggyBac transposase with SEQ ID NO: 17.

[0190] In one embodiment, the programmable transposase can comprise one or more substitutions relative to the wild-type hyperactive PiggyBac transposase that are involved in integration, e.g., 315, 341, 372, and/or 375 (e.g., R315A, R341A, R372A, and/or K375A); numbering based on the wild-type hyperactive PiggyBac transposase with SEQ ID NO: 9 or on the modified hyperactive PiggyBac transposase with SEQ ID NO: 18.

[0191] In one embodiment, the modified hyperactive PiggyBac transposase is selected for its high specificity of DNA integration into a genome compared to the wild-type hyperactive PiggyBac transposase. In one embodiment, the modified hyperactive PiggyBac transposase comprises an amino acid sequence having one or more of the modifications disclosed herein relative to any one of SEQ ID NOs: 9-18 and 108-113, and retains at least 80%, at least 85%, at least 90%, at least 95%, at least 96%, at least 97%, at least 98%, or at least 99% identical to the sequence set forth in SEQ ID NOs: 1-18 and 108-113, respectively.

[0192] As shown in the examples, newly developed hyperactive PiggyBac transposase substitutions library have been used to identify modified hyperactive PiggyBac which perform specific targeted transpositions. Modified hyperactive PiggyBac with positive targeted transposition were identified using such library.

[0193] In one embodiment, the modified hyperactive PiggyBac transposase can comprise a substitution of one or more of amino acids selected from amino acid: 245, 275, 275, 277, 325, 347, 351, 372, 375, 388, 450, 465, 560, 564, 573, 589, 592, 594; numbering based on the wild-type hyperactive PiggyBac transposase with SEQ ID NO: 9.

[0194] In one embodiment, the modified hyperactive PiggyBac transposase comprises one or more of the amino acid substitution selected from: R245A, R275A, R275A, R277A, R275A/R277A, G325A, N347A, N347S, S351E, S351P, S351A, R372A, K375A, R388A, D450N, W465A, T560A, S564P, S573A, M589V, S592G, or F594L; numbering based on the wild-type hyperactive PiggyBac transposase with SEQ ID NO: 9.

[0195] In one embodiment, the modified hyperactive PiggyBac transposase comprises the amino acid substitution D450N; numbering based on the wild-type hyperactive PiggyBac transposase with SEQ ID NO: 9.

[0196] In one embodiment, the modified hyperactive PiggyBac transposase comprises the amino acid modification N347A; numbering based on the wild-type hyperactive PiggyBac transposase with SEQ ID NO: 9. In another embodiment, the modified hyperactive PiggyBac transposase comprises the amino acid substitution N347S; numbering based on the wild-type hyperactive PiggyBac transposase with SEQ ID NO: 9.

[0197] In one embodiment, the modified hyperactive PiggyBac transposase comprises the double amino acid substitutions D450N and N347A; numbering based on the wild-type hyperactive PiggyBac transposase with SEQ ID NO: 9. In another embodiment, the modified hyperactive PiggyBac transposase comprises the double amino acid substitutions D450N and N347S; numbering based on the wild-type hyperactive PiggyBac transposase with SEQ ID NO: 9.

[0198] In one embodiment, the modified hyperactive PiggyBac transposase comprises the amino acid substitutions R372A, K375A and D450; numbering based on the wild-type hyperactive PiggyBac transposase with SEQ ID NO: 9.

[0199] In one embodiment, the modified hyperactive PiggyBac transposase comprises the amino acid substitutions R245A and D450; numbering based on the wild-type hyperactive PiggyBac transposase with SEQ ID NO: 9.

[0200] In one embodiment, the modified hyperactive PiggyBac transposase comprises the amino acid substitutions R245A, G325A, and S573P; numbering based on the wild-type hyperactive PiggyBac transposase with SEQ ID NO: 9.

[0201] In one embodiment, the modified hyperactive PiggyBac transposase comprises the amino acid modifications R245A, G325A, D450 and S573P; numbering based on the wild-type hyperactive PiggyBac transposase with SEQ ID NO: 9.

[0202] In one embodiment, the modified hyperactive PiggyBac transposase comprises the amino acid substitutions N347S and D450N; numbering based on the wild-type hyperactive PiggyBac transposase with SEQ ID NO: 9.

[0203] In one embodiment, the modified hyperactive PiggyBac transposase comprises the amino acid substitutions N347A and D450N; numbering based on the wild-type hyperactive PiggyBac transposase with SEQ ID NO: 9. In one embodiment, this modified hyperactive PiggyBac transposase comprises the amino acid sequence of SEQ ID NO: 110.

[0204] In one embodiment, the modified hyperactive PiggyBac transposase comprises one or several amino acid substitutions selected among L25F, R36A, I42K, G59D, I212K, N245S, K252A and/or Q271L; numbering based on the wild-type hyperactive PiggyBac transposase with SEQ ID NO: 9.

[0205] The modified hyperactive PiggyBac transposases provided herein can be fused to other elements disclosed herein, such as a site-specific DNA binding protein capable of binding and cleaving a target nucleic acid sequence; or can be used either alone, or in combination with such other elements. In one embodiment, the modified hyperactive PiggyBac transposases disclosed herein comprise the amino acid sequence of SEQ ID NO: 9, wherein:
[0206] amino acid at position 34 is V or M,
[0207] amino acid at position 43 is T or I,
[0208] amino acid at position 177 is Y or H,
[0209] amino acid at position 202 is R or K,
[0210] amino acid at position 230 is S or N,
[0211] amino acid at position 245 is A,
[0212] amino acid at position 268 is D or N,
[0213] amino acid at position 275 is R or A,
[0214] amino acid at position 277 is R or A,
[0215] amino acid at position 325 is A or G,
[0216] amino acid at position 347 is N, S or A,
[0217] amino acid at position 351 is E, P or A,
[0218] amino acid at position 372 is R or A,
[0219] amino acid at position 375 is A or K,
[0220] amino acid at position 388 is R or A,
[0221] amino acid at position 409 is K or A,
[0222] amino acid at position 411 is A or T,
[0223] amino acid at position 412 is K or A,
[0224] amino acid at position 450 is D or N,
[0225] amino acid at position 460 is R or A,
[0226] amino acid at position 465 is W or A,
[0227] amino acid at position 517 is S or A,
[0228] amino acid at position 560 is T or A,
[0229] amino acid at position 564 is P or S,
[0230] amino acid at position 571 is S or N,
[0231] amino acid at position 573 is S or A,
[0232] amino acid at position 576 is K or A,
[0233] amino acid at position 586 is H or A,
[0234] amino acid at position 587 is I or A,
[0235] amino acid at position 589 is M or V,
[0236] amino acid at position 592 is G or S, and/or
[0237] amino acid at position 594 is L or F.

[0238] In one embodiment, the transposase is a Sleeping Beauty transposase.

[0239] In one embodiment, the Sleeping Beauty transposase comprises or consists of an amino acid sequence having at least 85%, 90%, 95%, 96%, 97%, 98%, 99%, or 100% sequence identity to SEQ ID NO: 73. An exemplary nucleic acid sequence encoding this protein is as set forth in SEQ ID NO: 72.

[0240] In one embodiment, the transposase is a modified Sleeping Beauty transposase. In one embodiment, the modified Sleeping Beauty transposase comprises one or more substitutions as compared to the wild-type Sleeping Beauty transposase.

[0241] In one embodiment, the one or more substitutions in the Sleeping Beauty transposase are selected among L25F, R36A, I42K, G59D, I212K, N245S, K252A and/or Q271L; numbering based on the wild-type Sleeping Beauty transposase with SEQ ID NO: 73.

[0242] In one embodiment, the transposase is not a Himar1C9 mutant.

[0243] As will be further detailed below, certain aspects of the disclosure are also directed to vectors or plasmids (e.g., expression vectors, packaging vectors, etc.) comprising a nucleic acid construct encoding the transposase, in particular any of the hyperactive PiggyBac transposases or modified hyperactive PiggyBac transposases described herein; said vectors or plasmids being preferably suitable for expression in a host cell, e.g., mammalian cells, yeast cells, insect cells, plant cells, fungal cells, or algal cells.

[0244] In one embodiment, the first protein comprising or consisting of the site-specific DNA binding protein capable of binding and cleaving a target nucleic acid sequence (as described above), and the second protein comprising or consisting of a transposase (as described above), are fused together to form a fusion protein, either directly or indirectly via a linker.

[0245] Any embodiments relating to the site-specific DNA binding protein on one hand, and to the transposase on the other hand, apply mutatis mutandis in the case of the fusion protein described herein.

[0246] Hence, in one embodiment, the fusion protein comprises or consists of:
[0247] (i) a first protein comprising or consisting of an RNA-guided DNA nuclease, a zinc finger protein or a transcription activator like effector nuclease, as described above, and
[0248] (ii) a second protein comprising or consisting of a transposase, as described above.

[0249] In one embodiment, the fusion protein comprises or consists of:
[0250] (i) a first protein comprising or consisting of an RNA-guided DNA nuclease or zinc finger protein, as described above, and
[0251] (ii) a second protein comprising or consisting of a transposase, as described above.

[0252] In one embodiment, the fusion protein comprises or consists of:
[0253] (i) a first protein comprising or consisting of an RNA-guided DNA nuclease, as described above, and
[0254] (ii) a second protein comprising or consisting of a transposase, as described above.

[0255] In one embodiment, the fusion protein comprises or consists of:
[0256] (i) a first protein comprising or consisting of a Cas9 protein or a variant thereof, as described above, and
[0257] (ii) a second protein comprising or consisting of a hyperactive PiggyBac transposase or a modified hyperactive PiggyBac transposase, as described above; in particular a modified hyperactive PiggyBac transposase, as described above.

[0258] In one embodiment, the first protein and the second protein can be oriented in the fusion protein in either order.

[0259] In one embodiment, the fusion protein comprises or consists of the first protein fused at the C-terminal end of the second protein, either directly or indirectly via a linker. In other words, the fusion protein comprises or consists of, from N- to C-terminal: (i) the second protein (i.e., the transposase); (ii) optionally, a linker; and (iii) the first protein (i.e., the site-specific DNA binding protein, preferably the RNA-guided DNA nuclease; more preferably the Cas9 protein or variant thereof).

[0260] In one embodiment, the fusion protein comprises or consists of the first protein fused at the N-terminal end of the second protein, either directly or indirectly via a linker. In other words, the fusion protein comprises or consists of, from N- to C-terminal: (i) the first protein (i.e., the site-specific DNA binding protein, preferably the RNA-guided DNA nuclease; more preferably the Cas9 protein or variant thereof); (ii) optionally, a linker; and (iii) the second protein (i.e., the transposase).

[0261] In one embodiment, the fusion protein comprises a linker.

[0262] Suitable examples of linkers include peptidic linkers, between the first protein and the second protein (in any order).

[0263] In one embodiment, the peptidic linker is selected from the group comprising or consisting of (GGS)ₙ, (GGGGS)ₙ with SEQ ID NO: 114, (G)ₙ, (EAAAK)ₙ with SEQ ID NO: 115, XTEN linkers, and (XP)ₙ motif, and combinations of any of any of these, wherein n is independently an integer between 1 and 50.

[0264] In one embodiment, the linker is 12- to 24-amino acid long, or is encoded by a nucleic acid sequence that is 36- to 72-nucleotide long.

[0265] In one embodiment, the linker is a XTEN linker or a (GGS)ₙ linker.

[0266] In one embodiment, the linker is selected among the linkers shown in Table 1.

TABLE 1
Linkers

| | Nucleic acid sequence | Amino acid sequence |
|---|---|---|
| Linker | (SEQ ID NO) | (SEQ ID NO) |
| GGSx3 | ggtggatctggcggtggatctggtggcggt | GGSGGGSGGG |
| | (SEQ ID NO: 40) | (SEQ ID NO: 41) |
| GGS4x | ggagggagtggtgggtccggtggtagtggcggatcc | GGSGGSGGSGGS |
| | (SEQ ID NO: 42) | (SEQ ID NO: 43) |
| GGS5x | ggaggctccggtgggtctggtgggagcggtggtagt | GGSGGSGGSGGSGGS |
| | ggcggatcc | (SEQ ID NO: 45) |
| | (SEQ ID NO: 44) | |
| GGS6x | ggaggcagtggtgggagcggtggttccgggggtagt | GGSGGSGGSGGSGGSGGS |
| | ggtggttccgggggatcc | (SEQ ID NO: 47) |
| | (SEQ ID NO: 46) | |
| GGS7x | ggaggttctggaggctccggtgggtccgggggaagt | GGSGGSGGSGGSGGSGGS |
| | ggggggtcaggcggatcaggaggatcc | GGS |
| | (SEQ ID NO: 48) | (SEQ ID NO: 49) |
| GGS8x | ggaggtagcggaggttccggagggagcggcgggag | GGSGGSGGSGGSGGSGGS |
| | tgggggaagcgggggaagtggaggatccggggga | GGS |
| | ggatcc | (SEQ ID NO: 51) |
| | (SEQ ID NO: 50) | |
| Linker | tccggtagcgaaacaccggggacttcagaatcggcca | SGSETPGTSESATPES |
| XTEN | ccccggagtct | (SEQ ID NO: 53) |
| | (SEQ ID NO: 52) | |
| Linker B | ggaagcgccggtagtgcggctgggtctggcgagttc | GSAGSAAGSGEF |
| | (SEQ ID NO: 54) | (SEQ ID NO: 55) |

[0267] In one embodiment, the linker comprises an amino acid sequence selected from the group comprising or consisting of SEQ ID NO: 41, SEQ ID NO: 43, SEQ ID NO: 45, SEQ ID NO: 47, SEQ ID NO: 49, SEQ ID NO: 51, SEQ ID NO: 53, SEQ ID NO: 55, or any combination thereof; respectively encoded by the exemplary nucleic acid sequence of SEQ ID NO: 40, SEQ ID NO: 42, SEQ ID NO: 44, SEQ ID NO: 46, SEQ ID NO: 48, SEQ ID NO: 50, SEQ ID NO: 52, SEQ ID NO: 54.

[0268] In one embodiment, the linker comprises or consists of the amino acid sequence of SEQ ID NO: 41; encoded by the exemplary nucleic acid sequence of SEQ ID NO: 40.

[0269] Also provided herein are fusion proteins obtained from the expression of any of the nucleic acid constructs provided in this disclosure.

[0270] In one embodiment, the fusion protein is a triple fusion protein.

[0271] Such triple fusion protein can comprise or consist of:
[0272] one first protein (i.e., one site-specific DNA binding protein) and two second protein (i.e., two transposases); or
[0273] two first protein (i.e., two site-specific DNA binding proteins) and one second protein (i.e., one transposase).

[0274] In one embodiment, the triple fusion comprises or consists of one first protein (i.e., one site-specific DNA binding protein) and two second protein (i.e., two transposases), and the triple fusion comprises from N- to C-terminal:
[0275] (i) the site-specific DNA binding protein, (ii) a first transposase; (iii) a second transposase; or
[0276] (i) a first transposase; (ii) the site-specific DNA binding protein, (iii) a second transposase; or
[0277] (i) a first transposase; (ii) a second transposase, (iii) the site-specific DNA binding protein.

[0278] In one embodiment, the first and second transposases are identical. In one embodiment, the first and second transposases are different. For example, the first transposase can be a hyperactive PiggyBac transposase and the second transposase can be a modified hyperactive PiggyBac transposase, chosen among any of the modified hyperactive PiggyBac transposases described herein. Alternatively, both the first and second transposases can be modified hyperactive PiggyBac transposases, but each bearing a different substitution or different combination of substitutions as described herein.

[0279] In one embodiment, the first and second transposases are capable of forming a functional dimer.

[0280] In one embodiment, the triple fusion comprises or consists of two first protein (i.e., two site-specific DNA binding proteins) and one second protein (i.e., one transposase), and the triple fusion comprises from N- to C-terminal:
[0281] (i) a first site-specific DNA binding protein, (ii) a second site-specific DNA binding protein; (iii) the transposase; or
[0282] (i) a first site-specific DNA binding protein; (ii) the transposase, (iii) a second site-specific DNA binding protein; or
[0283] (i) the transposase; (ii) a first site-specific DNA binding protein, (iii) a second site-specific DNA binding protein.

[0284] In one embodiment, the first and second site-specific DNA binding proteins are identical. In one embodiment, the first and second site-specific DNA binding proteins are different. For example, the first site-specific DNA binding protein can be a Cas9 protein and the second site-specific DNA binding protein can be a variant of a Cas9 protein, chosen among any of the Cas9 protein variants described herein. Alternatively, both the first and second site-specific DNA binding proteins can be Cas9 protein variants, but each being a different variant.

[0285] In one embodiment, the triple fusion protein optionally comprises a linker between two of its proteins or between the three proteins.

[0286] Also disclosed herein is a fusion protein comprising:
[0287] (i) the second protein comprising or consisting of a transposase; or a nucleic acid construct encoding said second protein, as described above, and
[0288] (ii) an RNA-binding protein capable of binding to at least one specific RNA sequence; or a nucleic acid construct encoding said RNA-binding protein.

[0289] In one embodiment, the fusion protein comprises a linker, as described above.

[0290] In one embodiment, the second protein comprises or consists of a transposase, said transposase being a hyperactive PiggyBac with SEQ ID NO: 9. In one embodiment, the second protein comprises or consists of a transposase, said transposase being a modified hyperactive PiggyBac comprising one or more amino acid mutations as compared to the hyperactive PiggyBac with SEQ ID NO: 9. In particular, the modified hyperactive PiggyBac can be any of those disclosed herein.

[0291] In one embodiment, the transposase/RNA-binding protein fusion can be further fused to the first protein comprising or consisting of the site-specific DNA binding protein, as described above.

[0292] In some embodiments, the RNA-binding protein is a MS2 bacteriophage coat protein (MCP) or a fragment thereof.

[0293] In some embodiments, the MCP has at least 75%, 80%, 85%, 90%, 95%, 96%, 97%, 98%, 99% or 100% identity with SEQ ID NO: 132 (encoded, e.g., by the nucleic acid sequence with SEQ ID NO: 131).

[0294] In some embodiments, the RNA-binding protein is capable of binding to at least one specific RNA sequence, said RNA sequence comprising a tetraloop. The term “tetraloop” is used interchangeably with the terms “stem loop” and “hairpin loop”.

[0295] In some embodiments, the at least one tetraloop is a MS2 RNA tetraloop-binding sequence.

[0296] In some embodiments, the tetraloop is comprised within a guide RNA (gRNA). In certain embodiments, the gRNA is in a complex with a Cas9 protein, as described above.

[0297] In some embodiments, the gRNA comprises at least one MS2 RNA tetraloop-binding sequence. In some embodiments, the gRNA comprises more than one MS2 RNA tetraloop-binding sequences.

[0298] In some embodiments, the gRNA comprising the at least one MS2 RNA tetraloop-binding sequence has at least 75%, 80%, 85%, 90%, 95%, 96%, 97%, 98%, 99% or 100% identity with SEQ ID NO: 134 (encoded, e.g., by the DNA sequence with SEQ ID NO: 133).

[0299] In some embodiments, the MCP in the fusion protein binds non-covalently to at least one MS2 RNA tetraloop-binding sequence comprised in a gRNA itself non-covalently bound to a Cas9 protein; in particular, the binding of the fusion protein to the Cas9/gRNA complex directs the excision activity of the modified hyperactive PiggyBac transposase towards the site specifically recognized by the Cas9/gRNA complex.

[0300] As will be further detailed below, certain aspects of the disclosure are also directed to vectors or plasmids (e.g., expression vectors, packaging vectors, etc.) comprising a nucleic acid construct encoding the fusion protein described herein; said vectors or plasmids being preferably suitable for expression in a host cell, e.g., mammalian cells, yeast cells, insect cells, plant cells, fungal cells, or algal cells.

[0301] According to the invention, the composition can comprise the first protein and/or the second protein (or the fusion protein comprising both), either as proteins, as described above; or as nucleic acid constructs encoding these proteins.

[0302] Hence, in one embodiment, the composition of the invention comprises or consists of:
[0303] a) a nucleic acid construct encoding the first protein described above, comprising or consisting of a site-specific DNA binding protein capable of binding and cleaving a target nucleic acid sequence described above;
[0304] b) a nucleic acid construct encoding a second protein described above, comprising or consisting of a transposase; and
[0305] c) a nucleic acid construct comprising or consisting of a transgene encoding the laminin-α2 protein, functional variant or fragment thereof.

[0306] In another embodiment, the composition of the invention comprises or consists of
[0307] a) a nucleic acid construct encoding the fusion protein described above, comprising or consisting of (i) a first protein comprising or consisting of a site-specific DNA binding protein capable of binding and cleaving a target nucleic acid sequence, and (ii) a second protein comprising or consisting of a transposase; and
[0308] b) a nucleic acid construct comprising or consisting of a transgene encoding the laminin-α2 protein, functional variant or fragment thereof.

[0309] In one embodiment, the nucleic acid construct encoding the fusion protein further comprises a nucleic acid sequence encoding a linker between the first and the second protein, as described above; or in the case of a triple fusion protein, between two of its proteins or between the three proteins.

[0310] According to the disclosure, the first and second proteins, or the fusion protein comprising or consisting of said first and second proteins, enable and/or promote site-specific insertion of a transgene into a genome, in particular of the transgene encoding the laminin-α2 protein, functional variant or fragment thereof.

[0311] Some embodiments are directed to a plasmid or a vector (such as, e.g., an expression vector) comprising either:
[0312] a nucleic acid construct encoding the first protein; or
[0313] a nucleic acid construct encoding the second protein; or
[0314] a nucleic acid construct encoding the first protein and a nucleic acid construct encoding the second protein; or a nucleic acid construct encoding the fusion protein or triple fusion protein.

[0315] In some embodiments, the plasmid is a packaging plasmid. In some embodiments, the plasmid further comprises a polynucleotide encoding capsid proteins, e.g., gag and pol. In some embodiments, the plasmid is combined with a second plasmid comprising a polynucleotide that encode proteins for a viral envelope (envelope plasmid); and a third plasmid comprising a nucleic acid construct comprising the LAMA2 transgene, wherein when the combination is introduced into a production cell line (e.g., eukaryotic cells, prokaryotic cells and/or cell lines), a virus particle comprising the nucleic acid constructs encoding the LAMA2 transgene and the nucleic acid construct encoding either of the first protein, second protein, both first and second proteins or fusion protein, is produced.

[0316] In some embodiments, the plasmid is combined with a second plasmid comprising comprising a polynucleotide encoding capsid proteins, e.g., gag and pol (a packaging plasmid, wherein the packaging plasmid lacks a functional integrase), a third plasmid comprising a polynucleotide that encodes proteins for a viral envelope (envelope plasmid) and a fourth plasmid comprising a nucleic acid construct comprising the LAMA2 transgene, wherein when the combination is introduced into a production cell line (e.g., eukaryotic and prokaryotic cells and/or cell lines), a virus particle comprising the nucleic acid constructs comprising the LAMA2 transgene and the nucleic acid construct encoding either of the first protein, second protein, both first and second proteins or the fusion protein, is produced.

[0317] In one embodiment, the first protein, second protein, both first and second proteins or fusion protein, and/or the LAMA2 transgene, are delivered to a cell using a lentivirus particle.

[0318] In one embodiment, the nucleic acid construct comprises a first polynucleotide sequence encoding the first protein comprising or consisting of site-specific DNA binding protein engineered to bind a target nucleic acid sequence, a second polynucleotide sequence encoding the second protein comprising or consisting of a transposase that enables insertion of LAMA2 transgene into the genome, and optionally, a third polynucleotide sequence comprising a nucleic acid sequence encoding a linker between the first and second polynucleotides. In some embodiments, the first protein is a zinc finger protein or a Cas9 protein or variant thereof, as described above; and/or the second protein is a hyperactive PiggyBac transposase or modified hyperactive PiggyBac transposase, as described above.

[0319] Examples of suitable linkers to produce a fusion protein have been described hereabove.

[0320] In some embodiments, a linker is not needed because the first protein is expressed from a separate plasmid from the second protein.

[0321] In one embodiment, instead of using a linker, the first and/or the second polynucleotide sequences comprise nucleic acids encoding the first and second protein, respectively, and further comprise additional nucleotides in at least one of their ends that make the function of linker.

[0322] In one embodiment, the nucleic acid construct is in DNA or RNA form.

[0323] Also provided herein, are vectors comprising any of the nucleic acid constructs provided in this disclosure. Particularly, the vectors are suitable for expression in mammalian cells, yeast cells, insect cells, plant cells, fungal cells, or algal cells. Also provided herein, are host cells comprising any of the nucleic acid constructs or vectors provided in this disclosure.

[0324] According to the invention, the composition further comprises a nucleic acid construct comprising or consisting of a transgene encoding the laminin-α2 protein, functional variant or fragment thereof, also called herein “LAMA2 transgene”.

[0325] In one embodiment, the LAMA2 transgene may be any nucleic acid sequence encoding a laminin-α2 protein, in particular a wild-type mammalian, preferably human, laminin-α2 protein, a functional variant or fragment thereof.

[0326] In one embodiment, the LAMA2 transgene can comprise either the LAMA2 wild-type gene (or a functional variant or fragment thereof), a LAMA2 cDNA (or a functional variant or fragment thereof) or a LAMA2 minigene (or a functional variant or fragment thereof).

[0327] In one embodiment, the LAMA2 transgene comprises a full-length LAMA2 gene.

[0328] Laminin-α2 chain protein is encoded by the LAMA2 gene (Gene ID: 3908, updated on Nov. 24, 2020), which is transcribed and translated into a 390-kDa protein. Laminin-α2 is a component of a heterotrimeric, cross-shaped molecule known as laminin-211 (or merosin) composed of three subunits (alpha, beta and gamma) which are bound to each other by disulfide bonds.

[0329] The coding sequences of a number of different mammalian laminin-α2 proteins are known in the art, including, without limitation, the laminin-α2 protein from human, pig, chimpanzee, dog, cow, mouse, rabbit or rat, and can be easily found in sequence databases. Alternatively, the coding sequence may be easily determined by the skilled person based on the polypeptide sequence.

[0330] In particular, the LAMA2 transgene can encode a human laminin subunit α2 isoform a precursor (NCBI reference: NP_000417, submitted on Oct. 22, 2020) or a laminin subunit α2 isoform b precursor (NCBI reference: NP_001073291.2, submitted on Oct. 24, 2020).

[0331] In one embodiment, the LAMA2 transgene encodes the human laminin subunit α2 isoform a precursor, preferably with SEQ ID NO: 74.

[0332] After translation, the laminin-α2 chain is typically cleaved into an N-terminal fragment and a C-terminal fragment that are non-covalently associated with each other.

[0333] In one embodiment, the LAMA2 transgene can encode different human mature isoforms of the laminin-α2 protein, preferably selected from the group comprising or consisting of laminin subunit α2 isoform X1 (NCBI reference: XP_005267038.1, with SEQ ID NO: 116), laminin subunit α2 isoform X2 (NCBI reference: XP_011534122.1, with SEQ ID NO: 117), laminin subunit α2 isoform X3 (NCBI reference: XP_005267039.1, with SEQ ID NO: 118), laminin subunit α2 isoform X4 (NCBI reference: XP_016866340.1, with SEQ ID NO: 119), laminin subunit α2 isoform X5 (NCBI reference: XP_01686634.1, with SEQ ID NO: 120) and laminin subunit α2 isoform X6 (NCBI reference: XP_005267038.1, with SEQ ID NO: 121).

[0334] As used herein, the terms “fragment” or “functional fragment”, when referring to the laminin-α2 protein or the nucleic acid coding therefor, refers to a protein, polypeptide or nucleic acid derived from the laminin-α2 protein as described above which still retains the activity of the full-length laminin-α2 protein but whose sequence is not 100% identical to the full-length protein, polypeptide or nucleic acid. A functional fragment can possess more, fewer, or the same number of residues as the corresponding native molecule, and/or can contain one or more amino acid or nucleotide substitutions. Preferably, the functional fragment refers to a mature form of the laminin-α2 protein which does not comprises a signal peptide at the N-terminal end of the protein. The skilled artisan can readily determine to which part of the laminin-α2 protein the signal peptide corresponds, e.g., based on information publicly available on the Uniprot database.

[0335] In one embodiment, the LAMA2 transgene comprises the sequence with SEQ ID NO: 75. In one embodiment, the LAMA2 transgene comprises a human LAMA2 minigene comprising a synthetic intron with SEQ ID NO: 82. In one embodiment, said synthetic intron is included between the nucleobases at position 3925 and 3926 of the coding sequence with SEQ ID NO: 75.

[0336] In one embodiment, the LAMA2 transgene may be any nucleic acid sequence encoding a functional laminin-α2 protein variant which retains the activity of a full-length laminin-α2 protein. In particular, laminin-α2 protein variants retain the ability to bind to laminin-211 β- and γ-subunits by disulfide bonds to form a functional cross-shaped laminin-211 or laminin-221. Laminins form independent networks and are associated with type IV collagen networks via entactin, fibronectin, and perlecan. They also bind to cell membranes through integrin receptors and other plasma membrane molecules, such as the dystroglycan glycoprotein complex and lutheran blood group glycoprotein. Through these interactions, laminins critically contribute to cell attachment and differentiation, cell shape and movement, maintenance of tissue phenotype, and promotion of tissue survival.

[0337] Preferably, as used herein, the terms “variant” or “functional variant”, with reference to the laminin-α2 protein, refer to a polypeptide having an amino acid or nucleotide sequence having at least 70, 75, 80, 85, 90, 95 or 99% sequence identity to the wild-type laminin-α2 protein sequence.

[0338] More preferably, the terms “variant” or “functional variant” refer to a polypeptide having an amino acid sequence that differs from a wild-type laminin-α2 protein sequence by less than 30, 25, 20, 15, 10 or 5 substitutions, insertions and/or deletions. In one embodiment, the variant differs from the wild-type laminin-α2 protein sequence by one or more conservative substitutions, preferably by less than 15, 10 or 5 conservative substitutions. Examples of conservative substitutions are within the groups of basic amino acids (arginine, lysine and histidine), acidic amino acids (glutamic acid and aspartic acid), polar amino acids (glutamine and asparagine), hydrophobic amino acids (methionine, leucine, isoleucine and valine), aromatic amino acids (phenylalanine, tryptophan and tyrosine), and small amino acids (glycine, alanine, serine and threonine).

[0339] In one embodiment, the LAMA2 transgene therefore comprises a sequence having at least 70, 75, 80, 85, 90, 95 or 99% sequence identity to SEQ ID NO: 75.

[0340] In one embodiment, the LAMA2 transgene may comprise an optimized sequence encoding the laminin-α2 protein, variant or fragment thereof.

[0341] The term “optimized”, in the context of a nucleic acid sequence, refers to codon optimization and means that a codon that typically expresses a bias for human is changed to a synonymous codon (i.e., a codon that codes for the same amino acid residue) that does not express a bias for human. Thus, the change in codon does not result in any amino acid changes in the encoded protein.

[0342] According to the invention, the LAMA2 transgene is comprised in a nucleic acid construct.

[0343] In one embodiment, the nucleic acid construct comprises the LAMA2 transgene operably linked to one or more control sequences that direct the expression of said transgene in cells.

[0344] The promoter contains transcriptional control sequences that mediate the expression of the LAMA2 transgene upon introduction into a host cell. The promoter may be any polynucleotide that shows transcriptional activity in cells including mutant, truncated, and hybrid promoters. The promoter may be a constitutive or inducible promoter, preferably a constitutive promoter, and more preferably a strong constitutive promoter.

[0345] Examples of suitable promoters include, but are not limited to, CMV promoter, preferably with SEQ ID NO: 76, CAG promoter, preferably with SEQ ID NO: 77, EF1-α promoter, preferably with SEQ ID NO: 78, SV-40 promoter, preferably with SEQ ID NO: 79 and hybrid albumin enhancer-α1-antitrypsin (EalbAAT) liver specific promoter, preferably with SEQ ID NO: 80.

[0346] In an alternative embodiment, the LAMA2 transgene can also be inserted into the genome of a cell in such a manner that its expression is driven by an endogenous promoter at or near the integration site. In particular, the nucleic acid construct comprising the LAMA2 transgene can contain a splice acceptor to ensure gene expression when the transgene is integrating into the intron of an actively-expressed gene such as the endogenous LAMA2 or albumin gene, to have an endogenous control of expression.

[0347] Splice acceptor sites provide signals to target the sequences following the splice acceptor site to be expressed as (Padgett et al., 1988. Annu Rev Biochem. 55:1119-1150). A splice acceptor site is a nucleotide sequence that is generally involved in RNA splicing to remove intronic RNA sequences. The splice acceptor site is normally involved in the excision of introns, during which it is bound by an RNA-protein complex referred to as a spliceosome, cleaved, and then joined to a splice donor site that has already been cleaved. Splice acceptor sequences are well known in the art and can be readily obtained from genes at a position between the exon and intron where they mediate splicing. Alternately, splice acceptor sites may be chemically or enzymatically synthesized. Splice acceptor (SA) sites typically end in AG dinucleotides that are highly conserved. The remaining nucleotides of the sequence are primarily cytidines and/or thymidines. In one embodiment, the splice acceptor has a sequence with SEQ ID NO: 81.

[0348] The control sequence may also include appropriate transcription initiation, termination, and enhancer sequences; efficient RNA processing signals such as splicing and polyadenylation signals; sequences that stabilize cytoplasmic mRNA; sequences that enhance translation efficiency (i.e., Kozak consensus sequence); and/or sequences that enhance protein stability. A great number of expression control sequences, e.g., native, constitutive, inducible and/or tissue-specific, are known in the art and may be utilized to drive expression of the LAMA2 transgene. Typically, the LAMA2 transgene is operably linked to a transcriptional promoter and a transcription terminator. Poly(A) signals typically consist of a) a consensus sequence AAUAAA, which has been shown to be required for both 3′-end cleavage and polyadenylation of premessenger RNA (pre-mRNA), as well as to promote downstream transcriptional termination, and b) additional elements upstream and downstream of the AAUAAA sequence that control the efficiency of utilization of AAUAAA as a poly(A) signal. There is considerable variability in these motifs in mammalian genes.

[0349] In one embodiment, the polyadenylation signal sequence in the nucleic acid construct is a polyadenylation signal sequence of a mammalian gene or a viral gene. Suitable polyadenylation signals include, but are not limited to, a SV40 early polyadenylation signal, a SV40 late polyadenylation signal, a HSV thymidine kinase polyadenylation signal, a protamine gene polyadenylation signal, an adenovirus 5 EIb polyadenylation signal, a growth hormone polyadenylation signal, a PBGD polyadenylation signal, as well as in silico designed polyadenylation signals (synthetic) and the like. In one embodiment, the polyadenylation signal sequence is a poly(A) having a sequence selected from the group comprising or consisting of SEQ ID NO: 83, 84 and 85.

[0350] In one embodiment, the nucleic acid construct comprising the LAMA2 transgene also comprises an insulator element, to increase transgene expression levels, avoid silencing, and reduce expression variability.

[0351] Insulators are a complex class of cis-acting regulatory sequences that prevent the spread of heterochromatin and silencing of genes (barrier activity) and have enhancer-blocking activity. Insulators are typically 300 bp to 2000 bp in length. There are many examples of insulators, including the CTCF insulator, the gypsy insulator, and the β-globin locus.

[0352] In one embodiment, insulator element sequences flank both ends of the nucleic acid construct.

[0353] In one embodiment, the nucleic acid construct comprising the LAMA2 transgene comprises insulator elements with SEQ ID NOs: 86 and 87.

[0354] In one embodiment, the transposase disclosed herein recognizes inverted terminal repeat (ITR) elements that carry transposase-binding sites to catalyze excision and subsequent reintegration of the element between ITRs.

[0355] Thus, in a particular embodiment, said nucleic acid construct comprising LAMA2 transgene is flanked by inverted terminal repeats (ITR) that carry transposase binding sites, preferably 5′-ITR and 3′-ITR of SEQ ID NO: 88 and 89.

[0356] In one embodiment, an increase of the size between ITRs positively regulates the transfer of the LAMA2 transgene into genomic DNA.

[0357] In one embodiment, the size between ITRs is at least 105 bp. In one embodiment, the size between ITRs is at least 200 bp. In one embodiment, the size between ITRs is at least 300 bp.

[0358] As used herein, the term “at least 300 bp” means 300 bp, 400 bp, 500 bp, 600 bp, 700 bp, 800 bp, 900 bp, 1 kb, 2 kb or more.

[0359] In one embodiment, the nucleic acid construct comprising the LAMA2 transgene is contained in an expression vector.

[0360] Examples of appropriate vectors include, but are not limited to, recombinant integrating or non-integrating viral vectors and vectors derived from recombinant bacteriophage DNA, plasmid DNA or cosmid DNA. In one embodiment, said vector is a plasmid vector, a minicircle vector or a doggy bone DNA donor vector. Preferably, the vector is a recombinant integrating or non-integrating viral vector. Examples of recombinant viral vectors include, but not limited to, vectors derived from herpes virus, retroviruses, lentivirus, vaccinia viruses, adenoviruses, adeno-associated viruses or bovine papilloma virus.

[0361] In one embodiment said viral vector is a lentiviral or retroviral vector. The present disclosure thus also relates to viral particles comprising a nucleic acid construct comprising the LAMA2 transgene, or an expression vector comprising said nucleic acid construct, as described above. In particular, the nucleic acid construct or the expression vector may be packaged into a virus capsid to generate a “viral particle”, also named “viral vector particle”.

[0362] In one embodiment, the nucleic acid construct or the expression vector is packaged into a lentiviral or AAV-derived capsid, to generate a “lentiviral particle” or “AAV particle”.

[0363] According to the invention, the first protein comprises or consists of a site-specific DNA binding protein capable of binding and cleaving a target nucleic acid sequence.

[0364] As used herein, a “target sequence” or “target nucleic acid sequence” or “target site” is a sequence that defines a portion of a nucleic acid, e.g., in a genome, to which a binding molecule will bind, provided sufficient conditions for binding exist.

[0365] Said first protein can be engineered to bind to any sequence of choice within the genome of a cell, called “target nucleic acid sequence”. For example, the sequence 5′-GAATTC-3′ is a target site for the EcoRI restriction endonuclease.

[0366] In one embodiment, the target nucleic acid sequence is within a safe harbor locus in a cell's genome. In one embodiment, the target nucleic acid sequence is within the endogenous LAMA2 gene in a cell's genome. In particular, the first and/or second protein can be engineered to bind and/or to integrate the transgene encoding the laminin-α2 protein within a safe harbor locus.

[0367] A “safe harbor locus” refers to a region of a cell's genome, where the integrated material can be adequately expressed without perturbing endogenous gene structure or function. Safe harbor loci include, but are not limited to, AAVS1 (intron 1 of PPP1R12C), HPRT, HI 1, hRosa26, albumin and F-A region. The safe harbor loci may be exons or introns of ubiquitously expressed genes and/or genes with tissue specific expression (e.g., muscle). Safe harbor loci can be selected from the group consisting of: exon 1, intron 1 or exon 2 of PPP1R12C, exon 1, intron 1 or exon 2 of HPRT, and exon 1, intron 1 or exon 2 of hRosa26, intron 1 of the albumin gene. A safe harbor locus may also include a region of the genome devoid of endogenous genes and with open chromatin that allows for the expression of the inserted transgene without perturbing the genome structure or function.

[0368] In one embodiment, the first and/or second protein is engineered to bind and integrate the LAMA2 transgene into the endogenous LAMA2 gene within the genome of a cell, in particular into intron 1 of the endogenous LAMA2 gene.

[0369] In one embodiment, the first protein, optionally in combination with a guide RNA, bind a target nucleic acid sequence selected from the group consisting of any one of SEQ ID NOs: 90-97.

[0370] In one embodiment, the composition of the invention further comprises a guide RNA.

[0371] As used herein, a “guide RNA”, “gRNA” or “single guide RNA” refers to a nucleic acid that promotes the specific targeting or homing of a gRNA/Cas complex to a target nucleic acid.

[0372] In particular, gRNA refers to an RNA molecule that comprises a transactivating crRNA (tracrRNA) and a crRNA. Preferably, said guide RNA corresponds to a crRNA and tracrRNA which can be used separately or fused together. The complementary sequence pairing with the target sequence recruits Cas proteins to bind and cleave the DNA at the target sequence.

[0373] In one embodiment, the guide RNA is engineered to comprise a complementary sequence to a part of a target sequence, preferably selected from the group consisting of any one of SEQ ID NOs: 90-97.

[0374] As used herein, the term “complementary sequence” refers to the sequence of a polynucleotide (e.g., part of crRNA or tracRNA) that can hybridize to another part of polynucleotides under standard low stringent conditions. Preferably, the sequences are complementary to each other pursuant to the complementarity between two nucleic acid strands relying on Watson-Crick base pairing between the strands, i.e., the inherent base pairing between adenine and thymine (A-T) nucleotides and guanine and cytosine (G-C) nucleotides.

[0375] The present disclosure also relates to a method for integrating a LAMA2 transgene into a target nucleic acid sequence within the genome of a cell. Said method comprises the step of introducing the composition as described above into a cell such that the first and second proteins (either separately or as part of the fusion protein described above) cleave the target nucleic acid sequence and integrate the LAMA2 transgene within said target nucleic acid sequence.

[0376] Said method involves introducing in the cell: the first and second proteins (either separately or as part of the fusion protein described above) or one or several nucleic acid constructs encoding the same; a guide RNA; and the nucleic acid construct comprising or consisting of a transgene encoding the laminin-α2 protein, functional variant or fragment thereof.

[0377] These elements may be synthesized in situ in the cell as a result of the introduction of nucleic acid construct(s) or expression vector(s) encoding said elements, as described above, into the cell. Alternatively, said elements may be produced outside the cell and then be introduced therein.

[0378] In one embodiment, a nucleic acid construct, an expression vector or a viral particle comprising the LAMA2 transgene as described above is introduced into the cell.

[0379] In one embodiment, one or several polynucleotides encoding the first and second proteins (either separately or as part of the fusion protein described above) may be transfected in mRNA form, which is introduced directly into the cells, for example by electroporation or lipid nanoparticles.

[0380] In one embodiment, the guide RNA may also be produced outside the cell and then introduced therein, for example by electroporation or lipid nanoparticles.

[0381] In one embodiment, the first and second proteins (either separately or as part of the fusion protein described above) can be introduced into the cell alone or pre-complexed with a guide RNA.

[0382] In one embodiment, the guide RNA and/or the first and second proteins (either separately or as part of the fusion protein described above) are encoded by a nucleic acid construct or expression vector.

[0383] Products (proteins and nucleic acids) according to the invention may be delivered inside cells or subcellular compartments by liposomal delivery means, polymeric carriers, chemical carriers, lipoplexes, polyplexes, dendrimers, nanoparticles, emulsion, natural endocytosis or phagocytose pathway as non-limiting examples, as well as physical methods such as electroporation.

[0384] Said nucleic acid construct or expression vector can be introduced into cell by any methods known in the art and include, as non-limiting examples, stable transformation methods in which the nucleic acid construct or expression vector is integrated into the cell genome, transient transformation methods in which the nucleic acid construct or expression vector is not integrated into the genome of the cell and virus-mediated methods. For example, transient transformation methods include for example microinjection, electroporation or particle bombardment.

[0385] Nucleic acid molecule or nucleic acid construct or expression vector according to the invention may be transferred into cells using any known technique including, but being not limited to calcium phosphate transfection, DEAE-Dextran transfection, electroporation, microinjection, biolistic, viral infection or liposome-mediated transfection.

[0386] In one embodiment, the RNA, preferably guide RNA or mRNA encoding the first and second proteins (either separately or as part of the fusion protein described above) can be produced in vitro by, e.g., in vitro transcription. The RNA may then be introduced into the cells by electroporation (as described for example in Almåsbak et al., 2011. Cytotherapy. 13(5):629-640; Rabinovich et al., 2009. Hum Gene Ther. 20(1):51-61; and Beatty et al., 2013. Cancer Immunol Res. 2(2):112-20).

[0387] Alternatively, RNA may be introduced by other means such as by liposomes or cationic molecules etc.

[0388] In one embodiment, nucleic acid construct(s) or vector(s) introduced into a cell may be expressed episomally or may be integrated into the genome of the cell.

[0389] In one embodiment, polynucleotides, such as guide RNA and mRNA encoding the first and second proteins (either separately or as part of the fusion protein described above) and/or nucleic acid construct comprising or consisting of the LAMA2 transgene, may be delivered to a cell or a patient by a nanoparticle, preferably a lipid nanoparticle (LNP). Any lipid or combination of lipids that are known in the art can be used to produce an LNP. Examples of lipids used to produce LNPs are: DOTMA, DOSPA, DOTAP, DMRIE, DC-cholesterol, DOTAP-cholesterol, GAP-DMORIE-DPyPE, and GL67A-DOPE-DMPE-polyethylene glycol (PEG). Examples of cationic lipids are: 98N12-5, C12-200, DLin-KC2-DMA (KC2), DLin-MC3-DMA (MC3), XTC, MD1, and 7C1.

[0390] Examples of neutral lipids are: DPSC, DPPC, POPC, DOPE, and SM. Examples of PEG-modified lipids are: PEG-DMG, PEG-CerC14, and PEG-CerC20.

[0391] In one embodiment, the method is an in vitro or ex vivo method. The in vitro method is performed on a culture of cells.

[0392] In another aspect, the present disclosure relates to an isolated engineered cell obtainable or obtained by the method described above. Said engineered cell comprises at least a transgene encoding laminin-α2 protein as described above.

[0393] In one embodiment, the isolated engineered cell comprises at least one transgene encoding laminin-α2, including any one or several of the control sequences that direct the expression of said transgene in cells, as described above.

[0394] In some embodiments, the isolated engineered cell comprises at least one transgene encoding laminin-α2, including flanking ITRs as described above.

[0395] In one embodiment, the inter-ITR size is at least 105 bp, at least 200 bp, at least 300 bp or more.

[0396] The engineered cell of the disclosure may be used for ex vivo gene therapy purposes. In such embodiments, the first and second proteins (either separately or as part of the fusion protein described above), the guide RNA and the LAMA2 transgene, or the nucleic acid construct(s), expression vector(s) or viral particle(s) as described above, are introduced into cells. Said isolated cells can be subsequently transplanted to the patient or subject. This implanting step may be accomplished using any method of implantation known in the art. For example, the genetically modified cells may be injected directly in the patient's blood or injected into the desired muscle, otherwise administered to the patient. Transplanted cells can have an autologous, allogenic or heterologous origin. In particular, said cells may be myocytes isolated from donor or patient skeletal muscle, smooth muscle or cardiac muscle or mesenchymental stem cells from bone marrow cells or peripheral blood. For clinical use, cell isolation will generally be carried out under Good Manufacturing Practices (GMP) conditions.

[0397] Suitable cells include, but not limited to, eukaryotic and prokaryotic cells and/or cell lines. Preferably, said cells are eukaryotic cells such as mammalian cells, these include, but are not limited to, humans, non-human primates such as apes; chimpanzees; monkeys, and orangutans, domesticated animals, including dogs and cats, as well as livestock such as horses, cattle, pigs, sheep, and goats, or other mammalian species including, without limitation, mice, rats, guinea pigs, rabbits, hamsters, and the like. A person skilled in the art will choose the more appropriate cells according to the patient or subject to be transplanted.

[0398] Said engineered cells may also be muscle cells. As used herein, the term “muscle” refers to cardiac muscle (i.e. heart) and skeletal muscle. As used herein, the term “muscle cells” refers to myocytes, myotubes, myoblasts, and/or satellite cells.

[0399] Said engineered cell may be a cell with self-renewal and pluripotency properties, such as stem cells or induced pluripotent stem cells. Suitable stem cells also include for example, embryonic stem cells, induced pluripotent stem cells (iPSCs), hematopoietic stem cells, neuronal stem cells and mesenchymal stem cells. Stem cells are preferably mesenchymal stem cells. Mesenchymal stem cells (MSCs) are capable of differentiating into at least one of an osteoblast, a chondrocyte, an adipocyte, or a myocyte and may be isolated from any type of tissue. Generally, MSCs will be isolated from bone marrow, adipose tissue, umbilical cord, or peripheral blood. Methods for obtaining thereof are well known to a person skilled in the art. Induced pluripotent stem cells (also known as iPS cells or iPSCs) are a type of pluripotent stem cell that can be generated directly from adult cells. Yamanaka et al. induced iPS cells by transferring the Oct3/4, Sox2, Klf4 and c-Myc genes into mouse and human fibroblasts, and forcing the cells to express the genes (WO 2007/069666). Thomson et al. subsequently produced human iPS cells using Nanog and Lin28 in place of Klf4 and c-Myc (WO 2008/118820). In certain embodiments, the cells are myoblasts. The myoblasts may be derived from stem cells, for example, iPSCs including from iPSCs derived from patients with muscular disorders such as muscular dystrophy.

[0400] The composition according to the present disclosure is preferably used in the form of a pharmaceutical composition comprising a therapeutically effective amount of products according to the present invention such as nucleic acid construct encoding said LAMA2 transgene, nucleic acid construct encoding the first and second proteins (either separately or as part of the fusion protein described above), polynucleotide or nucleic acid construct comprising guide RNA, expression vector or viral particle encoding said products.

[0401] In the context of the disclosure, a therapeutically effective amount refers to a dose sufficient for reversing, alleviating or inhibiting the progress of the disorder or condition to which such term applies, or reversing, alleviating or inhibiting the progress of one or more symptoms of the disorder or condition to which such term applies.

[0402] The effective dose is determined and adjusted depending on factors such as the composition used, the route of administration, the physical characteristics of the individual under consideration such as sex, age and weight, concurrent medication, and other factors, that those skilled in the medical arts will recognize.

[0403] In the various embodiments of the present disclosure, the pharmaceutical composition comprises a pharmaceutically acceptable carrier and/or vehicle.

[0404] A “pharmaceutically acceptable carrier” refers to a vehicle that does not produce an adverse, allergic or other untoward reaction when administered to a mammal, especially a human, as appropriate. A pharmaceutically acceptable carrier or excipient refers to a non-toxic solid, semi-solid or liquid filler, diluent, encapsulating material or formulation auxiliary of any type.

[0405] Preferably, the pharmaceutical composition contains vehicles, which are pharmaceutically acceptable for a formulation capable of being injected. These may be in particular isotonic, sterile, saline solutions (monosodium or disodium phosphate, sodium, potassium, calcium or magnesium chloride and the like or mixtures of such salts), or dry, especially freeze-dried compositions which upon addition, depending on the case, of sterilized water or physiological saline, permit the constitution of injectable solutions.

[0406] The pharmaceutical forms suitable for injectable use include sterile aqueous solutions or suspensions. The solution or suspension may comprise additives which are compatible with cells. The solution or suspension may comprise additives which are compatible with non-viral vectors, viral-vectors and nanoparticles and do not prevent components entry into target cells. In all cases, the form must be sterile and must be fluid to the extent that easy syringe ability exists. It must be stable under the conditions of manufacture and storage and must be preserved against the contaminating action of microorganisms, such as bacteria and fungi. An example of an appropriate solution is a buffer, such as phosphate buffered saline (PBS) or Ringer lactate.

[0407] The composition according to the present disclosure is used for therapy, in particular for the treatment of LAMA2-related muscular dystrophy.

[0408] LAMA2-related muscular dystrophy is a disorder that causes weakness and wasting (atrophy) of muscles used for movement (skeletal muscles). This condition varies in severity, from a severe, early-onset type to a milder, late-onset form.

[0409] Early-onset LAMA2-related muscular dystrophy is apparent at birth or within the first few months of life. It is considered part of a class of muscle disorders called congenital muscular dystrophies and is sometimes called congenital muscular dystrophy type 1A. Affected infants may have severe muscle weakness, lack of muscle tone (hypotonia), little spontaneous movement, and joint deformities (contractures). Weakness of the muscles in the face and throat can result in feeding difficulties and an inability to grow and gain weight at the expected rate. Respiratory insufficiency, which occurs when muscles in the chest are weakened, causes a weak cry and breathing problems that can lead to frequent, potentially life-threatening lung infections.

[0410] As affected children grow, they often develop an abnormal, gradually worsening side-to-side curvature of the spine (scoliosis) and inward curvature of the back (lordosis). Children with early-onset LAMA2-related muscular dystrophy often do not develop the ability to walk. Difficulty with speech may result from weakness of the facial muscles and an enlarged tongue. Seizures occur in about a third of individuals with early-onset LAMA2-related muscular dystrophy; rarely, heart complications occur in this form of the disorder.

[0411] Symptoms of late-onset LAMA2-related muscular dystrophy become evident later in childhood or adulthood, and are similar to those of a group of muscle disorders classified as limb-girdle muscular dystrophies. In late-onset LAMA2-related muscular dystrophy, the muscles most affected are those closest to the body (proximal muscles), specifically the muscles of the shoulders, upper arms, pelvic area, and thighs. Children with late-onset LAMA2-related muscular dystrophy sometimes have delayed development of motor skills such as walking, but generally achieve the ability to walk without assistance. Over time, they may develop rigidity of the back, joint contractures, scoliosis, and breathing problems. However, most affected individuals retain the ability to walk and climb stairs.

[0412] The disclosure provides also a method for treating a LAMA2-related muscular dystrophy according to the present disclosure, comprising: administering to a patient a therapeutically effective amount of the composition, engineered cell or pharmaceutical composition as described above.

[0413] A “therapeutically effective amount” refers to an amount effective, at dosages and for periods of time necessary to achieve the desired therapeutic result, and prevent, delay or reverse at least one or more signs or symptoms of LAMA2-related muscular dystrophy such as weakness and atrophy of skeletal muscles. The therapeutically effective amount of the product of the disclosure, or pharmaceutical composition that comprises it may vary according to factors such as the disease state, age, sex, and weight of the individual, and the ability of the product or pharmaceutical composition to elicit a desired response in the individual. Dosage regimens may be adjusted to provide the optimum therapeutic response. A therapeutically effective amount is also typically one in which any toxic or detrimental effect of the product or pharmaceutical composition is outweighed by the therapeutically beneficial effects.

[0414] As used herein, the terms “patient” or “individual” denote a mammal. Preferably, a patient or individual according to the disclosure is a human.

[0415] In the context of the disclosure, the terms “treating” or “treatment”, as used herein, mean reversing, alleviating or inhibiting the progress of LAMA2-related muscular dystrophy or condition to which such term applies, or reversing, alleviating or inhibiting the progress of one or more symptoms of the disorder or condition to which such term applies, in particular reduction of weakness and atrophy of skeletal muscles and/or improve of skeletal muscle function.

[0416] The pharmaceutical composition of the present disclosure is generally administered according to known procedures, at dosages and for periods of time effective to induce a therapeutic effect in the patient.

[0417] The administration can be systemic or local. Systemic administration is preferably parenteral such as subcutaneous (SC), intramuscular (IM), intravascular such as intravenous (IV) or intraarterial; intraperitoneal (IP); intradermal (ID), interstitial or else. The administration may be for example by injection or perfusion. In some preferred embodiments, the administration is parenteral, preferably intravascular such as intravenous (IV) or intraarterial. The practice of the present disclosure will employ, unless otherwise indicated, conventional techniques, which are within the skill of the art. Such techniques are explained fully in the literature.

[0418] Also provided by the present disclosure are kits for practicing the disclosed methods, as described herein. The kit can contain the first and second proteins (either separately or as part of the fusion protein described above) or nucleic acid constructs encoding the same, and a nucleic acid construct comprising the LAMA2 transgene as described herein. In some aspects, the kit can contain the lentiviral particles containing the nucleic acid constructs encoding the first and second proteins (either separately or as part of the fusion protein described above) and a nucleic acid construct comprising or consisting of the LAMA2 transgene as described herein.

[0419] The subject kit can further include instructions for using the components of the kit to practice the subject methods. The instructions for practicing the subject methods are generally recorded on a suitable recording medium. For example, the instructions can be printed on a substrate, such as paper or plastic, etc. As such, the instructions can be present in the kit as a package insert, in the labeling of the container of the kit or components thereof (i.e., associated with the packaging or subpackaging), etc. In other embodiments, the instructions are present as an electronic storage data file present on a suitable computer readable storage medium, e.g. CD-ROM, diskette, etc. In yet other embodiments, the actual instructions are not present in the kit, but means for obtaining the instructions from a remote source, e.g., via the internet, are provided. An example of this embodiment is a kit that includes a web address where the instructions can be viewed and/or from which the instructions can be downloaded. As with the instructions, this means for obtaining the instructions is recorded on a suitable substrate.

[0420] The disclosure typically relates to a composition or kit, comprising
[0421] a first composition including
[0422] (i) the first protein as defined herein, or a nucleic acid encoding said first protein,
[0423] (ii) the second protein as defined herein, or a nucleic acid encoding said second protein, and
[0424] (iii) a nucleic acid construct comprising or consisting of the LAMA2 transgene.

[0425] The disclosure also relates to a composition or kit, comprising
[0426] a first composition including
[0427] (i) a fusion protein as defined herein, or a nucleic acid encoding said fusion protein,
[0428] (ii) a nucleic acid construct comprising or consisting of the LAMA2 transgene.

[0429] In one embodiment, the composition or kit comprises exogenous nucleic acid in a minicircle, a plasmid or a viral vector, in particular in non-integrating viral vector, for example or non-integrating lentiviral vector. In one embodiment, the composition or kit as disclosed herein is comprised in a nanoparticle.

[0430] In one embodiment, the nucleic acid construct encoding the first and/or second proteins (either separately or as part of the fusion protein described above) is in form of RNA, DNA or protein, and the polynucleotide sequence encoding the LAMA2 transgene is in form of RNA or DNA, depending on the method of delivery. Particularly, the polynucleotide sequence encoding the exogenous nucleic acid is in form of RNA.

[0431] In one embodiment, the composition or kit is viral-free and the packaging vector is a nanoparticle, e.g., a polymeric or lipidic nanoparticle. The packaging vector can also be a carrier which is bound to the elements of the composition. In some embodiments, the composition is contained in a viral vector, particularly a lentiviral particle.

[0432] In one embodiment, the composition or kit comprises (a) the nucleic acid construct encoding the first and second proteins, either separately or as part of the fusion protein described above (e.g., comprising Cas9 and a transposase) in form of RNA, (b) a guide RNA if needed (e.g., as separate lineal single strand RNA molecule), and (c) a polynucleotide comprising or consisting of the LAMA2 transgene for insertion in DNA form (e.g. in a vector), contained in in or bound to a packaging vector.

[0433] In one embodiment, the composition comprises (a) the first and second proteins (either separately or as part of the fusion protein described above) described herein (e.g., comprising Cas9 and a transposase) in form of protein, (b) a guide RNA if needed (e.g., as separate lineal single strand RNA molecule), wherein the fusion protein and the guide RNA form a ribonucleic protein complex (RNP), and (c) a polynucleotide comprising or consisting of the LAMA2 transgene for insertion in DNA form (e.g. in a vector), contained in in or bound to a packaging vector.

[0434] In one embodiment, the composition comprises (a) the nucleic acid construct encoding the first and second proteins, either separately or as part of the fusion protein described above (e.g., comprising Cas9 and a transposase) in form of DNA, (b) a guide RNA if needed (e.g., as separate lineal RNA molecule or as DNA in a vector), and (c) a polynucleotide comprising or consisting of the LAMA2 transgene for insertion in DNA form (e.g. in a vector), contained in in or bound to a packaging vector.

[0435] In one embodiment, the composition comprises (a) the first and second proteins, either separately or as part of the fusion protein described above (e.g., comprising Cas9 and an integrase) in form of protein, (b) a guide RNA if needed (e.g., as separate RNA molecule complexing with the fusion protein), and (c) a polynucleotide comprising or consisting of the LAMA2 transgene for insertion, contained in in or bound to a packaging vector. In a particular embodiment, the packaging vector is a lentiviral particle. In some embodiments, the first and second proteins, either separately or as part of the fusion protein described above is/are bound to the lentiviral capsid by means of gag-pol or VPR (Viral Protein R). In some embodiments, the polynucleotide comprising or consisting of the LAMA2 transgene is in form of RNA as payload of the integrase.

[0436] In one embodiment, when the first protein is a ZFP, the guide RNA can not be needed.

[0437] The disclosure typically relates to a kit, comprising:
[0438] a first composition including
   [0439] (i) the first and second proteins, either separately or as part of the fusion protein described above, or a nucleic acid encoding the same, and wherein said first and second proteins comprise an amino acid sequence of a first guided RNA nickase Cas9, typically SpCas9 nickase with SEQ ID NO: 65 and a modified hyperactive PiggyBac, and,
   [0440] (ii) a first guided RNA nucleic acid,
[0441] a second composition including
   [0442] (iii) the first and second proteins, either separately or as part of the fusion protein described above, or a nucleic acid encoding the same, and wherein said first and second proteins comprise an amino sequence of a second guided RNA nickase Cas9, typically SaCas9 nickase with SEQ ID NO: 66 and a modified hyperactive Piggybac,
   [0443] (iv) a second guided RNA nucleic acid,
[0444] and a nucleic acid construct comprising LAMA2 transgene;
[0445] wherein each of the first and second proteins (in each of the first and second composition) are capable of heterodimerization and making double cuts determined by the first and second guided RNA at adjacent sites of a genomic DNA region, and optionally inserting said nucleic acid between the adjacent sites.

[0446] Some additional embodiments are disclosed hereafter.

[0447] E1: a composition comprising: a) a fusion protein comprising a first protein consisting of a site-specific DNA binding protein capable of binding a target nucleic acid sequence, preferably comprised within intron 1 of albumin; intron 1 of Lama2 or Rosa 26 locus and a second protein consisting of a transposase; or a nucleic acid construct, preferably mRNA encoding said fusion protein, b) a nucleic acid construct comprising a transgene encoding laminin-α2 protein, functional variant or fragment thereof.

[0448] E2: the transgene encodes laminin-α2 protein of SEQ ID NO: 74.

[0449] E3: the nucleic acid construct of b) comprises a promoter selected from the group consisting of: CMV promoter of SEQ ID NO: 76, CAG promoter of SEQ ID NO: 77, EF1-alpha promoter of SEQ ID NO: 78, SV-40 promoter of SEQ ID NO: 79 and EalbAAT promoter of SEQ ID NO: 80 or a splice acceptor of SEQ ID NO: 81.

[0450] E4: the nucleic acid construct of b) comprises a poly(A) signal sequence, preferably selected from the group consisting of SEQ ID NO: 83-85.

[0451] E5: the nucleic acid construct of b) can also comprises an insulator element, preferably selected from the group consisting of SEQ ID NO: 86-87.

[0452] E6: the nucleic acid construct of b) is flanked by inverted terminal repeats (ITR), preferably by 5′-ITR and 3′-ITR of SEQ ID NO: 88 and 89.

[0453] E7: the nucleic acid construct of b) may be comprised in a vector selected from the group consisting of: plasmid vector, a minicircle vector, a doggy bone DNA donor vector, a lentivirus vector and retrovirus vector.

[0454] E8: the site-specific DNA binding protein is RNA-guided nuclease comprising a Cas protein and the composition further comprises a guide RNA including a complementary sequence to a target nucleic acid sequence for integrating said LAMA2 transgene in a specific site of a genome of cell, preferably said Cas protein is S. pyogenes Cas 9 protein.

[0455] E9: the guide RNA comprises a complementary sequence of sequences selected from the group consisting of: SEQ ID NO: 90-97.

[0456] E10: the transposase is a modified hyperactive Piggybac transposase or Sleepy Beauty transposase, preferably a modified hyperactive PiggyBac transposase comprising one or more amino acid mutations to increase excision activity as compared to unmodified hyperactive Piggybac, and one or more amino acid mutations to decrease DNA binding activity as compared to unmodified hyperactive Piggybac.

[0457] E11: the hyperactive PiggyBac transposase is a modified hyperactive PiggyBac transposase comprising at least one mutation of amino acid selected from the group consisting of: M194, R245, G325, R372, K375, R376, E377, E380, D450 and S573, preferably comprising mutations of amino acids D450, R372 and K375, said position number corresponding to the amino acid number of unmodified hyperactive Piggybac of SEQ ID NO: 9.

[0458] E12: the transposase is preferably fused N-terminally to said site-specific DNA binding protein by a linker, preferably a peptidic linker comprising GGS, XTEN or FOKI, more preferably XTEN of SEQ ID NO: 53.

[0459] E13: the composition is packaged within nanoparticle.

[0460] E14: an in vitro method for integrating LAMA2 transgene into a target nucleic acid sequence within the genome of a cell comprising introducing into a cell a composition as described above and an engineered cell obtainable by said method comprising the LAMA2 transgene integrated within its genome.

[0461] E15: a pharmaceutical composition comprising a composition or an engineered cell as described above, optionally in combination with one or more pharmaceutically acceptable excipients.

[0462] E16: the composition, engineered cell or pharmaceutical composition for use in therapy, in particular for use in the treatment of merosin-deficient congenital muscular dystrophy type 1A (MDC1A) in a subject in need thereof.

[0463] The invention will now be exemplified with the following examples, which are not limitative, with reference to the attached drawings.

### BRIEF DESCRIPTION OF THE DRAWINGS

[0464] FIG. 1: Representation of the different Lama2 payloads that have been produced for therapeutic gene replacement in Lama2 animal models of MCD1A.

[0465] FIG. 2: Viral copy number on infected Hek293T cells with GFP or Lama2 loaded lentivirus. Titer was calculated based on qPCR estimations of copy numbers. The increased cargo size due to Lama2 decreases viral production efficiency 2 orders of magnitude.

[0466] FIG. 3: FACS analysis of circulating white blood cells (A) and infiltrated muscle cells (B); after isolation from mice 4 weeks after transplantation. Comparison of empty lentivirus transduction and GFP loaded virus is shown.

[0467] FIG. 4: Experimental design and workflow for the ex vivo lentivirus mediated Lama2 gene transfer to bone marrow derived cells to treat MCD1A models.

[0468] FIG. 5: Relative strength of treated and untreated MCD1A models versus wild type animals 6 and 12 weeks after transplantation with Lama2 expressing bone marrow derived cells (A). Muscle strength gain after treatment in the same animals (B). In both cases results showed the analysis of grip strength assays.

[0469] FIG. 6: Kaplan Meier survival curves for treated and untreated MCD1A models versus wild type animals over times.

[0470] FIG. 7: Experimental design and workflow for the in vivo, viral free, transposase mediated Lama2 gene transfer into liver cells to treat MCD1A models.

[0471] FIG. 8: Transgene copy number (A; C) and transgene expression (B; D); measured by qPCR and RT-qPCR respectively 4 weeks after treatment in liver cells. Data of RFP gene reporter, stably integrated by hyperactive PiggyBac (A; B); and Lama2 gene stably integrated by a programmable transposase Cas9 fused to an engineered PiggyBac (C; D) are shown.

[0472] FIG. 9: Elisa test for presence of Laminin in circulating serum after 1 week and 4 weeks of treatment of MDCIA models with Lama2, co-transfected with or without insertion machinery for stable expression.

[0473] FIG. 10: (A) RFP transposon alone (episomal) or together with hyPB or FICAT R372A_K375A_D450N mRNA delivered with in vivo JetPEI reagent were used to target Rosa26 safe harbor in mouse genome. Relative copy number of RFP transgene in liver was measured by semiquantitative qPCR and normalized to relative double copies of Tfrc gene (diploid genomes). (B) Liver integration of minicircle luciferase transposon. Minicircle luciferase transposon, sgRNA targeting Rosa26 locus and FiCAT (Cas9-hyPB R372A_K375A_D450N) mRNA were delivered by hydrodynamic injection and luciferase signal was monitored. (C) Junction PCR between transposon 3′ ITR and Rosa26 locus in liver genomic DNA. Mice were injected hydrodynamically with FiCAT R372A_K375A_D450N plasmid DNA or mRNA, gRNA targeting Rosa26 locus and minicircle transposon GFP payload and sacrificed 5 weeks after injection. PCR was performed amplifying genomic+ strand integration. n=2-3 animals/condition, numbers correspond to different individuals. 66% of treated mice with FiCAT mRNA or pDNA shows targeted insertion. Size of the band detected in FICAT corresponds to the expected size of the amplified insertion. A higher size band is detected in the episomal sample considered background.

[0474] FIG. 11: (a) C2C12 cells were transduced with RFP transposon alone (episomal), or in combination with FiCAT R372A_K375A_D450N and gRNA targeting Lama2 gene (spacer 271.1), RFP positive cells were monitored for 2 weeks after transduction. Mean±SD of n=2 technical replicates plotted. Representative image of n=3. (b) Karyoplot showing detected insertions in the c2c12 genome. (c) Junction PCR between 3′ ITR and Lama2 locus is shown (down panel) in + strand (1, 3) and − strand (2, 4) payload insertion comparing FiCAT (3, 4) and episomal (1, 2) treated enriched populations. Representative image of n=3. (d) Coverage at the on-target junction (Lama2 site).

[0475] FIG. 12: Targeted insertion of ½ GFP transposon in the AAVS1 site in the reporter cell line, relative to the insertion with 300 bp inter-ITR size. Inter-ITR sizes of 105 bp, 200 bp and 300 bp were tested for the insertion of ½ GFP with Cas9 fused to either hyperactive PiggyBac (hyPB) R372A_K375A_D450N (Cas9-PBx3) or a dimer of hyPB R372A_K375A_D450N (Cas9-PBx3-PBx3).

[0476] FIG. 13. Programmable transposase can be engineered with different Cas variants, such as CasX, CjCas9 Cpf1 or SaCas9, some of them achieved similar results in terms of programmable insertion at the target site as with SpCas9. Each of the Cas variant tested were targeted to the specific target region of the split GFP reporter cell line with 3 independent gRNAs.

[0477] FIG. 14. Programmable insertion activity of FiCAT R372A-K375A-D450N using four different nuclease proteins. SpCas9 is used as control for programmable insertion with gRNA-TRAC-1 only (left). Each nuclease was used with three independent gRNAs (1-3) for targeted insertion in ½ GFP reporter cell line.

[0478] FIG. 15. (a) Editing activity by CasX (left) and Cpf1 (middle). (b) Editing activity by SaCas9 (left), CjCas9 (middle). Mean % of reads with indels +/−SD is shown for two technical repeats, representative image of N=3 biological replicates. SpCas9 targeting the TRAC-1 site was used for reference (right).

[0479] FIG. 16. Programmable transposase can be engineered as a dimer polypeptide of two hyPB domains and a Cas9 nuclease, resulting in better programmable insertion compared to Cas9-hyPB. Split GFP reporter cell line was used for the programmable insertion of split GFP transposon to the target site. The mutant of hyPB R372A-K375A-D450N has been used for the monomer or dimer fusion to Cas9. Conditions: 1-Negative control with only hyPB as insertion machinery; 2: Positive control of Cas9-hyPB R372A-K375A-D450N in pcDNA expression vector; 3: Positive control of Cas9-hyPB R372A-K375A-D450N in Lentivirus expression vector; 4: Cas9 nuclease fused to two units of hyPB R372A-K375A-D450N in C-terminal; 5: Cas9 nuclease fused to two units of hyPB R372A-K375A-D450N one in C-terminal and the other one in N-terminal.

[0480] FIG. 17. Several cycles of selection of cells where programmable transposition took place allowed for the selection of best mutant combinations from a library. We identified several mutants with better enrichment, and programmable insertion capacity than Cas9-hyPB R372A-K375A-D450N when fused to Cas9.

[0481] FIG. 18. On-target efficiency increases over cycles of selection. Bulk variants selected from each cycle were co-transfected with gRNA targeting AAVS1 and ½ GFP transposon into the reporter cell line. Quantity of plasmid was corrected by PB copy number to normalize for cloning efficiency.

[0482] FIG. 19. (A) On-target efficiencies of the top selected candidates. Six individual candidates were selected based on the highest on-target activity among 96 random clones selected from the last cycle. The individual on-target activities were compared to Cas9-hyPB R372A-K375A-D450N. (B) Logo showing the predominant PB residues in top on-target activity variants.

[0483] FIG. 20. Double stranded breaks, by Cas9 and a single gRNA (gRNA-TCR1 or AAVS1-3) or by nickase Cas9 and two gRNAs targeting at nearby positions (gRNA-TCR1 and AAVS1-3), and programmable DNA binding domain (ZnF) in fusion to modified hyPB (mutants R372A-K375A-D405N) results in targeted insertion. Co-localization of double stranded break and PB in the insertion site is required for efficient on-targeted insertion. This can be achieved by nuclease Cas9 or double cut by nickase Cas9.

[0484] FIG. 21. Programmable insertion activity of dimeric hyPB R372A-K375A-D450N fused with either SpCas9 or SaCas9 for targeted insertion in ½ GFP reporter cell line.

[0485] FIG. 22. Increase of on-target efficiency over cycles of selection. (A) Bulk variants selected from each cycle were co-transfected with gRNA targeting AAVS1 and ½ GFP transposon into the reporter cell line. Quantity of plasmid was corrected by PB copy number to normalize for cloning efficiency. (B) Lentiviruses expressing bulk variants of each cycle were produced and used to infect reporter the cell line.

[0486] FIG. 23. Specific target integration relative to FiCAT (hyPB R372A-K375A-D450N) of single mutants isolated from bulk variants after 4 and 5 cycles of cas9_PB library enrichment co transfected with gRNA tcr1 and ½ GFP MC transposon.

[0487] FIG. 24. Relative comparison of the programmable insertion activity for targeted insertion in ½ GFP reporter cell line. (A) Comparison between hyPB R372A-K375A-D450N fused with SpCas9 protein (left) and hyPB R372A-K375A-D450N fused with MCP protein with SpCas9 added separately (right). (B) Comparison between 3 hyPB mutants (R372A-K375A-D450N; R202K-R275A-N347S-R372A-D450N-T560A-F594L; and R275A-N347S-R372A-D450N-T560A-F594L) fused to MCP protein with SpCas9 added separately.

[0488] FIG. 25. Comparison of the programmable insertion activity for targeted insertion in ½ GFP reporter cell line. (A) Comparison between the co-expression of hyPB R372A-K375A-D450N and SpCas9 protein (left) and the fusion protein comprising hyPB R372A-K375A-D450N with SpCas9 protein (right). (B) Relative comparison between 3 hyPB mutants (R372A-K375A-D450N; R202K-R275A-N347S-R372A-D450N-T560A-F594L; and R275A-N347S-R372A-D450N-T560A-F594L) co-expressed with SpCas9.

[0489] FIG. 26. Relative comparison of the programmable insertion activity for targeted insertion in ½ GFP reporter cell line with the co-expression of a first fusion protein comprising SpCas and hyPB R372A-K375A-D450N, and a second fusion protein comprising MCP protein and hyPB mutants (R372A-K375A-D450N; R202K-R275A-N347S-R372A-D450N-T560A-F594L; and R275A-N347S-R372A-D450N-T560A-F594L).

[0490] FIG. 27. Relative comparison of the programmable insertion activity for targeted insertion in ½ GFP reporter cell line with the co-expression of a fusion protein comprising SpCas and hyPB R372A-K375A-D450N, and 3 hyPB mutants R372A-K375A-D450N; R202K-R275A-N347S-R372A-D450N-T560A-F594L; and R275A-N347S-R372A-D450N-T560A-F594L.

[0491] FIG. 28. Comparison of the programmable insertion activity for targeted insertion in ½ GFP reporter cell line between SpCas9 fused to a dimer of hyPB R272A-K275A-D450N (left) and SpCas9 fused to a first hyPB R272A-K275A-D450N and to a second hyPB mutant (right).

### EXAMPLES

### 1. LAMA2 Payload Architecture

[0492] A LAMA2-coding sequence including leader sequence for exportation, for either Mus musculus (SEQ ID NO: 94) or Homo sapiens (SEQ ID NO: 75), can be used. The LAMA2-coding sequence can contain sequence recoding of a part of the sequence for payload specific detection and tracking after gene transfer, to differentiate it from the endogenous gene present in the organism we are performing the gene editing.

[0493] This LAMA2 gene is cloned downstream of a constitutive promoter (SEQ ID NOs: 76-79), or tissue specific promoter (SEQ ID NO: 80), or splice acceptor (SEQ ID NO: 81). The version with the splice acceptor can be integrated on the first intron of an actively-expressed gene to have an endogenous control of expression.

[0494] This coding sequence can also have a synthetic intron (SEQ ID NO: 82) for a mini-gene version of the payload. The cassette of expression can contain poly-A signals (SEQ ID NOs: 83-85), and insulator elements (SEQ ID NOs: 86-87).

[0495] The payload can be in the form of:
[0496] 1. A plasmid vector; containing bacterial origin of replication and antibiotic resistant 2. A minicircle vector, that in addition to the plasmid vector components also contains 32 SceI restriction enzyme target sites and 2 AttB and AttP recombination sites flanking the Lama2 expression cassette.
[0497] 3. A doggy bone DNA donor vector, that in addition to the plasmid vector components also contains TelN target site flanking the Lama2 expression cassette, for linearization and protection of the cargo ends of the donor DNA.
[0498] 4. A lentivirus or gamma retrovirus payload vector, with long terminal repeats flanking the Lama2 expression cassette in addition to lentivirus/retrovirus operational elements that could be engineered to reduce in size allowing for additional space for the therapeutic cargo.

[0499] In all these cases the Lama2 expression cassette can be flanked by inverted terminal repeats (ITRs) for transposase recognition (Piggybac and Sleeping Beauty).

[0500] FIG. 1 shows a representation of the different cargos containing Lama2 transgene.

[0501] The inventors further tested if the size between ITRs of the payload affects the binding capacity of the fusion protein, and therefore its consequent transfer into the genome. Three inter-ITR sizes were tried for targeted insertion of the payload efficiency: 300 bp, 200 bp and 105 bp approximately in a minicircle (MC) payload of ½ GFP transposon with FiCAT (Cas9+hyperactive PiggyBac transposase mutated on residues R372A_K375A_D450N) and FiCAT dimer (Cas9+dimer of hyperactive PiggyBac transposase mutated on residues R372A_K375A_D450N) and gRNA targeting AAVS1 site in the reporter cell line (FIG. 12). Best inter-ITR size was 300 bp and 200 bp, while the targeted integration efficiency of 105 bp was lower.

[0502] In addition to lentivirus and retrovirus-based delivery, the different Lama2 payloads can be delivered using polyplex and lipid nanoparticles or transduced by electroporation or microinjection as naked nucleic acids into targeted cells.

### 2. Ex Vivo Transduction of Lama2 Payload

[0503] Lentiviral particles containing the Lama2 coding sequence of Mus musculus, under the control of CMV promoter were produced using standard protocols for second generation lentivirus production. Given the large size of this payload, the particles were concentrated, and viral titer was calculated by viral copy number qPCR estimation after infecting Hek293T cells (FIG. 2).

[0504] Although efficiency of production was twice as low compared to reporter gene GFP, this titer was sufficient for ex vivo transduction of cells that can be then used for cell therapy in Lama2 mice models. Two different approaches were taken. Isolated muscle stem cells were transduced and transplanted into muscle of recipient models. Alternatively, hematopoietic progenitors derived from bone marrow cells were transduced with the lentivirus containing Lama2 expression cassette and these progenitors can then be transplanted into conditioned models via intravenous injection.

[0505] As a proof of concept for ex vivo treatment, the inventors isolated bone marrow derived hematopoietic progenitors and transduced them first with GFP expressing lentivirus, before transplanting them into conditioned mice. The inventors then check for engraftment 4 weeks after treatment by looking into GFP expression of white blood cells in circulating blood, and positive results were found (FIG. 3A). In addition, infiltration of circulating cells into the inflamed muscle was also checked and positive results were found (FIG. 3B).

[0506] Given the positive infiltration and payload expression of ex vivo transduced hematopoietic progenitors, the inventors then repeated this experiment with Lama2 expressing lentiviral particles (FIG. 4). Mice recovered muscle strength 12 weeks after treatment measured by grip assay (FIGS. 5A and B). In addition, survival of the treated Lama2 animal models was also observed (FIG. 6), indicating the therapeutic value of ex vivo cell transduction and transplantation to treat MDC1A patients.

[0507] In another line of experiments, the Inventors performed LAMA2-targeting insertion of RFP reporter into the C2C12 murine myoblast cell line with an efficiency of ˜20% (FIG. 11). Junction PCR and (STAT)-PCR were used to measure on-target and off-target efficiency. This improved efficiency was the result of the use of a fusion protein comprising a Cas9 and a hyperactive PiggyBac transposase mutated on residues R372A_K375A_D450N, referred to as FiCAT.

### 3. In Vivo Transduction of Lama2 Payload

[0508] Given the capacity of the liver to function as a bioreactor for protein production in vivo; the inventors explored the possibility to transduce in vivo liver cells of animal models with the Lama2 expression vector using a viral free gene delivery approach based on transposase.

[0509] Hyperactive PiggyBac transposase or an engineered hyperactive Piggybac fusion transposase with a programmable nuclease protein (SpCas9) either as a plasmid vector or mRNA molecule and a transposon Lama2 plasmid vector formulated using In vivo JetPei (PolyPlus) (FIG. 7) were injected intravenously in animal models, and tissues were harvested after 3 to 4 weeks for payload copy number in liver (RFP data as proof of concept) (FIG. 8A, C), and expression analysis in liver (RFP, FIG. 8C; Lama2, FIG. 8D) and circulating blood for Lama2 (FIG. 9). 100 μL of blood was collected 1 week after injection and whole blood was collected at the end-point.

[0510] Transgene copy number in liver cells after 4 weeks of treatment showed positive results and was further compared to RFP reporter gene, confirming similar transduction efficiencies with different size payloads (FIG. 8A, B). Reference to episomal delivery was done when no transposase was co-delivered. Expression of transgene for the RFP reporter and Lama2 gene were also confirmed in liver cells (FIG. 8B, D), and Lama2 expression was detected on blood 1 week and 4 weeks after delivery (FIG. 9).

### 4. Improved Tools for In Vivo Gene Delivery

[0511] With the aim of improving the programmable transposase used for gene delivery in vivo, the inventors used both plasmid DNA (pDNA) and mRNA for FiCAT (Cas9-hyPB R372A_K375A_D450N) and delivered it to mice liver targeting Rosa26 genomic safe harbor (RFP or luciferase encoding transposon for proof of concept) either in plasmid or MC form. High copy number of transgene was observed compared to an endogenous gene TFRC (FIG. 10A) and maintained transgene expression overtime (FIG. 10B). PCR of the junction between 3′ ITR and genomic locus was used to measure the newly formed on-target insertion (FIG. 10C).

4.1. Results of Cas Variants Fused to hyPB

[0512] To further characterize the capacity of engineered hyPB to perform programmable transposition, we substituted the SpCas9 mudile of the programmable transposase tested, which other Cas proteins form different organisms with nuclease activity (namely SaCas9 of SEQ ID NO:72, cpf1 of SEQ ID NO:74, CasX of SEQ ID NO:75, and CjCas9 of SEQ ID NO: 29). Specific gRNA targeting the region upstream of the split GFP reporter were designed and cloned for Hershey cell line transfection. Targeted transposition was measured by means of GFP expression (FIG. 13).

[0513] These results were confirmed in another line of experiments: we obtained good programmable insertion activity for CjCas9 and LbCpf1, while CasX did not achieve any programmable integration in our assay. Notably, SaCas9 had the highest levels of programmable insertion among the Cas proteins tested, with similar levels to SpCas9 fused to modified hyPB (FIG. 14). Indels were determined for the different Cas proteins used and the three different gRNA designed for each protein by Ilumina NGS (FIG. 15), shown for normalization purpose.

[0514] These positive results validate the engineered hyPB for programmable transposition to be useful for any sequence specific nuclease module.

### 4.2. Additional Results of Cas9 Fused to a Dimer of PB Mutants

[0515] Given the nature of PB acting as dimers when performing transposition, we attempted to generate a fusion protein of Cas9 and hyPB R372A-K375A-D450N mutant. We compared the on-target activity of these fusion to Cas9-PB mutants alone. We observed a better performance of the configuration Cas9-PB-PB; while the configuration PB-Cas9-PB did not outperform the Cas9-PB monomeric fusion (FIG. 16). For the dimeric fusion to Cas9 we used a recorded version of hyPB R372A-K375A-D450N mutant to facilitate cloning and expression.

[0516] Interestingly, if the Cas9 fused to the dimeric hyPB R372A-K375A-D450N is the SaCas9 instead of SpCas9, the activity is further increased (FIG. 21). The increased performance of SaCas9 over SpCas9 with the dimeric hyPB is consistent with the results obtained with monomeric hyPB (FIGS. 13 and 14).

### 4.3. Results of ZNF-PB Mutants Rescue

[0517] We wanted to further explore the role of the double-strand break (DSB) activity induced by close by (4 nucleotides) target sites of two gRNAs promoting single stranded cuts by SpCas9 nickase variant (D10A) in facilitating targeted integration, while lowering off target activity by means of non-inducing DSB in off target sites. We used a Zinc finger-PB fusion for directed localization of the transposon, by fusion with D450N mutant and R372A-K375A-D450N mutant and complemented it with two on-site single stranded brakes by an independent nickase Cas9, or single DSB by Cas9 nuclease.

[0518] Znf-PB fusion exhibited no or very low targeted insertion activity that was rescued when combined with introducing DSBs near the Znf binding site with a single or dual gRNA guided-cas9 either nuclease or nickase (FIG. 20).

### 4.4. Results of Cas9-hyPB Mutant Variants

[0519] To further explore mutant combinations that could do programmable transposition with better efficiencies, several cycles of selection of cells were performed where GFP was reconstituted by programmable insertion of the split GFP reporter system. Interestingly we observed several combinations that out-performed the Cas9-hyPB R372A-K375A-D450N (FIG. 17). Especially worth of mention is variant of hyPB fused to Cas9 that are mutated on hyPB at AA: A351-A372-A375-A388-N450-A465-A573-V589-G592-L594 (also identified as SEQ ID NO:2), several fold enrich in the positive cells population compared to R372A-K375A-D450N (SEQ ID NO:1); and also A245-A275-A277-A372-A465-V589 (SEQ ID NO:3) and A275-A325-A372-A560 (SEQ ID NO:4) to a lesser extent.

[0520] In another line of experiments, PiggyBac DNA library was produced by Twist Bioscience, cloned in fusion with cas9 into a lentiviral vector and transformed into stb4 competent cells, ensuring ×100 variant complexity. Plasmids were purified by maxiprep and cotransfected with lentivirus packaging plasmids into Hek293T cells. Lentivirus was used to infect ½ GFP reporter cell line. Infected cells were transfected with the ½ GFP transposon and gRNA targeting AAVS1 sequence. GFP positive cells were selected by flow cytometry sorting and genomic DNA was extracted. PB was amplified from the extracted gDNA, recloned into lentiviral vector to restart a new cycle. Best performing programmable transposase variants were selected and transfected individually with AAVS1 gRNA and MC ½ GFP.

[0521] First, a random selection of 96 variants was performed and best performing variants were screened separately (FIG. 18). A summary of best PB amino acid variants for high on-target insertion confirms the importance of mutations D450N, R372A and K375A; but highlights other important residues which contribute to increased targeted efficiency (FIG. 19B). The six PB variants with best on-target efficiencies were selected (FIG. 19A). The individual on-target activities were significantly improved compared to FiCAT (Cas9-hyPB R372A-K375A-D450N) with the following variants: N347A-D450N; N347S-D450N-T560A-S573A-F594L; R202K-R275A-N347S-R372A-D450N-T560A-F594L; R275A-N347S-K375A-D450N-S592G; R275A-N347S-R372A-D450N-T560A-F594L; and R275A-R277A-N347S-R372A-D450N-T560A-S564P-F594L (two-sided t-test).

[0522] This experiment was repeated and confirmed (FIG. 22A). We also produced lentiviruses expressing bulk variants of each cycle and infected reporter cell line correcting its titer by the PB variants CN, demonstrating a similar increase of on-target efficiency over cycles (FIG. 22B). Single mutants were isolated from bulk variants after 4 and 5 cycles of cas9_PB library enrichment. Mutants were tested separately by transfecting on-target reporter cell line with FiCAT mutant, gRNA tcr1 and ½ GFP MC transposon. Best FiCAT mutants are shown in comparison with FiCAT R372A_K375A_D450N (FIG. 23). The individual on-target activities were significantly improved compared to FiCAT (Cas9-hyPB R372A-K375A-D450N) with the following variants: R202K-R275A-N347S-R372A-D450N-T560A-F594L; R245A-N347S-R372A-D450N-T560A-S564P-S573A-S592G; R275A-N347S-R372A-D450N-T560A-F594L; N347A-D450N; R277A-G325A-N347A-R375A-D450N-T560A-S564P-S573A-S592G-F594L; N347S-D450N-T560A-S573A-F594L; V34M-R275A-G325A-N347S-S351A-R372A-K375A-D450N-T560A-S564P; G325A-N347S-K375A-D450N-S573A-M589V-S592G; S230N-R277A-N347S-K375A-D450N; T43I-R372A-K375A-A411T-D450N; G325A-N347S-S351A-K375A-D450N-S573A-M589V-S592G; Y177H-R275A-G325A-K375A-D450N-T560A-S564P-S592G.

[0523] The superiority of mutants R202K-R275A-N347S-R372A-D450N-T560A-F594L, R275A-R277A-N347S-R372A-D450N-T560A-S564P-F594L and R275A-N347S-R372A-D450N-T560A-F594L compared to the mutant R372A-K375A-D450N was further demonstrated in triple fusion proteins comprising a SpCas9 and two hyPB (FIG. 28).

4.5. Results of Cas9 and hyPB Non-Covalent Linking

[0524] In addition to the covalent binding of Cas9 with hyPB R372A-R375A-D450N through a linker, we user the MS2-MCP system to link Cas9 and the fusion protein consisting of MCP protein and hyPB R372A-R375A-D450N through a modified gRNA containing a tetraloop of MS2 sequence binding the MCP protein.

[0525] The combination of MCP-hyPB R372A-R375A-D450N fusion protein with Cas9 had an increased programmable insertion activity compared to Cas9-hyPB R372A-R375A-D450N fusion protein (FIG. 24A). In addition, we fused the MCP protein to other mutants of hyPB to perform programmable transposition in combination with SpCas9. Both variants used (R202K-R275A-N347S-R372A-D450N-T560A-F594L, and R275A-N347S-R372A-D450N-T560A-F594L) outperformed R372A-R375A-D450N (FIG. 24B).

4.6. Results of Cas9 and hyPB Decoupling for Programmable Transposition

[0526] We also tried the performance of SpCas9 with hyPB R372A-R375A-D450N without a linker, nor the MS2-MCP system. We co-expressed in the same cells SpCas9 and hyPB R372A-R375A-D450N, and an increased programmable insertion activity was registered compared to Cas9-hyPB R372A-R375A-D450N fusion protein (FIG. 25A). We extended the number of hyPB mutant variant tested not fused to Cas9, but being expressed at the same time, and acting together to achieve the activity of programmable transposition (FIG. 25B).

### 4.7. Results of Co-Expression of Cas9-hyPB and MCP-hyPB Fusion Proteins

[0527] We co-transfected hyPB R372A-R375A-D450N mutant fused to MCP protein, and hyPB mutants fused to SpCas9, in order to obtain a dimeric version of the fusion with one of the monomers being non-covalently linked. Several hyPB mutants fused to SpCas9 were compared for specific target integration (FIG. 26).

4.8. Results of Co-Expression of Cas9-hyPB and hyPB Variants

[0528] In a similar manner, we co-transfected the SpCas9 hyPB R372A-R375A-D450N fusion protein and hyPB mutants independently, in order to obtain a dimeric version of the fusion with one of the monomers not linked (FIG. 27).

### MATERIAL AND METHODS

### Lentivirus Production, Concentration and Titering

[0529] To produce virus, cells got co-transfected with pSICO (GFP) or pLV-Lama2 (Lama2) and pmd2.g (VSVG=envelope) and pax2 (containing packaging proteins, including IN) and sometimes with a plasmid just containing the wt-Integrase to rescue the non-infective Integrases. First 6×10⁵ HEK392T cells (passage 8) were seeded in a well of a 6-well tissue plat and incubated overnight. 5 h before starting the virus production, the media of cells was changed and on each well to 1.7 mL media containing 1:1000 CD (Chloroquine diphosphate; Stock=25 mM). The plasmids were infected in a molar ratio 1.6:1.32:0.72:3.32 (pSICO:pax2:VSVG:wtIN-rescue). PEI (Polyethylenimine; Stock=1 mg/mL) was used as transfection reagent, while 3 μL PEI was used for lug of total DNA used for transfection. DNA was diluted in 83 μL Opti-MEM (Thermo Scientific; #31985062) and PEI in another 83 μL. After mixing both solutions, they were incubated for 15-20 min at room temperature. Each transfection mix was added dropwise to the cells with the CD-Medium. Cells were incubated overnight. Media was changed by the next day and 2.5 mL fresh media was added. The next day the supernatant of cells was centrifuged for 5 min at 1000 rpm and passed through a 45 μm filter. Ultracentrifugation for 90 minutes at 19.500 rpm at 4° C. and resuspended overnight at 1:100 of the original media volume. The supernatant was stored at −80° C.

[0530] To determine the virus titer, HEK293T cells were infected with the produced virus and the amount of GFP positive cells was counted, since GFP was encoded on the viral packaging sequence. Therefore, 75000 HEK393T cells were seeded per well of a 6-well plate. Cells were infected with a mix of 1 mL media containing 1:1000 Polybrene and 500 μL previously produced Virus supernatant (1:3). The media was changed by the next day. The following day, the media was aspirated, and cells were detached using 200 μL Trypsin. The reaction was stopped adding 800 μL normal media and analyzed by cell cytometry. In the case of non-fluorescent Lama2 payload, gDNA was extracted from cells and qPCR was done to determine copy number for payload versus genomes.

### In Vivo Lama2 Delivery

[0531] Animal experimentation procedures were approved by the Animal Experimentation Ethic Committee of Barcelona Biomedical Research Park. C57BL/6J or Lama2 model dj2y/dj2y, 8-10 weeks old were used for this study. The animals were purchased from Jackson Laboratories, male and female were used without distinction.

[0532] Donor mice were sacrificed at 8 weeks of age and bone marrow cells were collected from hind limb bones; Lineage negative depletion was performed using Mouse Lineage Cell Depletion Kit (Miltenyi Biotec) following manufacturer instruction; and cells were transduced with Lentivirus overnight in Stem cell culture media with appropriate stimulating factors (StemCell Technologies). These cells were then harvested and transplanted into recipient mice (after conditioning by radiation) by retro-orbital injection.

[0533] Blood and tibialis muscle were collected from treated mice, 4 weeks after transplantation. Lysis Buffer (Thermo Fisher Scientific) was used to process blood samples following manufacturer instruction before FACS analysis. Tibialis muscles were minced and further processed with liberase/dispase digestion to isolate infiltrated cells before FACS analysis.

[0534] Grip strength assay was performed using a Bioseb device according to manufacturer instruction 6 and 12 weeks after treatment.

[0535] hyPB mRNA was produced with RiboMAX Large Scale RNA Production Systems-T7 (Promega) following manufacturer's instructions. Rosa26 gRNA (25) was purchased from IDT. hyPB mRNA, gRNA targeting Rosa26 and PB512-B or Lama2 transposon were injected via retro-orbital in a 1:2.5:2.5 ratio. A total of 55 μg of nucleic acids were complexed to; In vivo-JetPEI (Polyplus transfection) at NP ratio 7. Animals were euthanized 10 days after-injection and the liver was isolated and homogenized. Genomic DNA and RNA was extracted from liver samples. Transposon relative Copy number to Tfrc endogenous gene and transgene relative expression were obtained by qPCR, RT-qPCR or Elisa test respectively.

[0536] Imaging of luciferase expression was performed at different timepoints after FiCAT-gRNA-transposon or transposon control administration with IVIS spectrum imaging system (Caliper Life Sciences). Images were taken 5 min after intraperitoneal injection of D-Luciferin potassium salt (Gold Biotechnology) according to the manufacturer's instructions.

gDNA and RNA Harvest from Liver

[0537] Genomic DNA extraction was performed according to the DNeasy® Blood & Tissue Kit Protocol (QIAGEN®). Liver tissue was homogenized in PBS (phosphate-buffered saline). 20 μL of Proteinase K (provided by the kit) was added together with 200 μL of Buffer AL. After vortexing, the samples were incubated at 56° C. for 10 min. After the addition of 200 μL of ethanol (96-100%) and brief vortexing, the mixture was transferred into a Dneasy Mini spin column placed in a 3 mL collection tube and centrifuged at 8000 rpm for 1 min. The spin column was moved to a new 2 mL collection tube and 500 μL of Buffer AW1 was added. Tubes were centrifuged at 8000 rpm for 1 min. This washing step was repeated for Buffer AW2 (centrifugation of 3 min). Then, the spin was transferred to a new 1.5 mL microcentrifuge tube and 200 μL of Buffer AE was added to the center of the spin column membrane to elute the DNA by letting the tube stand for 1 min and it was followed by a centrifugation of 1 min at 8000 rpm. Concentration was measured with a NanoDrop One® (ThermoFisher Scientific).

qPCR and RT-qPCR

[0538] 25 ng/μL and 10 ng/μL dilutions of genomic DNA samples were analyzed by qPCR. 5 μL of each dilution were mixed with 4.4 μL PowerUP SYBR Green MasterMix (Fisher Scientific) and 0.3 μL oligo forward and reverse. Oligos targeting Lama2, RFP and TfrC endogenous gene were used (SEQ ID NO: 100-105

[0539] Retrotranscription of mRNA to cDNA was performed using High-Capacity RNA-to-cDNA kit (ThermoFisher Scientific). 1 μg mRNA samples were mixed with 10 μL Buffer and 1 μL Enzyme mix in a 20 μL reaction. Reaction was incubated 2 h at 37° C. and inactivated for 10 min at 80° C. RT product was diluted 10 times and qPCR was performed mixing 5 μL of sample with 4.4 μL PowerUP SYBR Green MasterMix (Fisher Scientific) and 0.3 μL oligo fw and rv. Oligos targeting Lama2, RFP and GAPDH endogenous gene were used (SEQ ID NO: 102-107)

### Enzyme Linked Immunosorbent Assay (ELISA)

[0540] Whole blood was centrifuged at 4° C. 10 min 1200×g in a table top centrifuge. Plasma was separated and stored at 80° C. until ELISA assay was performed. Human Laminin subunit alpha-2 (LAMA-2) ELISA kit (Cusabio) was used. 20 μL of plasma was diluted with 80 μL of Sample buffer. Diluted samples were placed in the plate and incubated for 2 h. Wells were aspirated but not washed and 100 μL of Biotin-antibody was added. Plate was incubated for 1 h and washed 3 times with a wash buffer. 100 μL of HRP-avidin were added to each well and incubated at 37° C. 1 h. A washing step of 5 washed was performed carefully. 90 μL of TMB substrate was added and plate was incubated 20 min at 37° C. 50 μL of Stop Solution were added, plate was gently tapped and optical density was determined within 5 min at 450 nm in a Plate Reader.

### Fluorescent Activated Cytometry Analysis (FACS)

[0541] Circulating white blood cells and infiltrated cells in the muscle were isolated before emGFP expression was measured at (BD LSR Fortessa; BD Biosciences. Blue 488 nm laser with 530/30 filter and Yellow Green 561 nm laser with 610/20 filter).

The application's sequence listing, which the Patent Office published only in electronic form, follows.

SEQUENCE LISTING (134 sequences)

SEQ ID NO: 1 - protein, 594 aa, Artificial Sequence
  Modified hyperactive PiggyBac
MGSSLDDEHILSALLQSDDELVGEDSDSEVSDHVSEDDVQSDTEEAFIDEVHEVQPTSSGSEILDEQNVIEQPGSSLASNRILTLPQRTIRGKNKHCWSTSKPTRRSRVSALNIVRSQRGPTRMCRNIYDPLLCFKLFFTDEIISEIVKWTNAEISLKRRESMTSATFRDTNEDEIYAFFGILVMTAVRKDNHMSTDDLFDRSLSMVYVSVMSRDRFDFLIRCLRMDDKSIRPTLRENDVFTPVRKIWDLFIHQCIQNYTPGAHLTIDEQLLGFRGRCPFRVYIPNKPSKYGIKILMMCDSGTKYMINGMPYLGRGTQTNGVPLGEYYVKELSKPVHGSCRNITCDNWFTSIPLAKNLLQEPYKLTIVGTVASNAREIPEVLKNSRSRPVGTSMFCFDGPLTLVSYKPKPAKMVYLLSSCDEDASINESTGKPQMVMYYNQTKGGVDTLNQMCSVMTCSRKTNRWPMALLYGMINIACINSFIIYSHNVSSKGEKVQSRKKFMRNLYMGLTSSFMRKRLEAPTLKRYLRDNISNILPKEVPGTSDDSTEEPVMKKRTYCTYCPSKIRRKASASCKKCKKVICREHNIDMCQSCF

SEQ ID NO: 2 - protein, 594 aa, Artificial Sequence
  Modified hyperactive PiggyBac
MGSSLDDEHILSALLQSDDELVGEDSDSEVSDHVSEDDVQSDTEEAFIDEVHEVQPTSSGSEILDEQNVIEQPGSSLASNRILTLPQRTIRGKNKHCWSTSKPTRRSRVSALNIVRSQRGPTRMCRNIYDPLLCFKLFFTDEIISEIVKWTNAEISLKRRESMTSATFRDTNEDEIYAFFGILVMTAVRKDNHMSTDDLFDRSLSMVYVSVMSRDRFDFLIRCLRMDDKSIRPTLRENDVFTPVRKIWDLFIHQCIQNYTPGAHLTIDEQLLGFRGRCPFRVYIPNKPSKYGIKILMMCDSGTKYMINGMPYLGRGTQTNGVPLGEYYVKELSKPVHGSCRNITCDNWFTAIPLAKNLLQEPYKLTIVGTVASNAREIPEVLKNSRSAPVGTSMFCFDGPLTLVSYKPKPAKMVYLLSSCDEDASINESTGKPQMVMYYNQTKGGVDTLNQMCSVMTCSRKTNRAPMALLYGMINIACINSFIIYSHNVSSKGEKVQSRKKFMRNLYMGLTSSFMRKRLEAPTLKRYLRDNISNILPKEVPGTSDDSTEEPVMKKRTYCTYCPSKIRRKASAACKKCKKVICREHNIDVCQGCL

SEQ ID NO: 3 - protein, 594 aa, Artificial Sequence
  Modified hyperactive PiggyBac
MGSSLDDEHILSALLQSDDELVGEDSDSEVSDHVSEDDVQSDTEEAFIDEVHEVQPTSSGSEILDEQNVIEQPGSSLASNRILTLPQRTIRGKNKHCWSTSKPTRRSRVSALNIVRSQRGPTRMCRNIYDPLLCFKLFFTDEIISEIVKWTNAEISLKRRESMTSATFRDTNEDEIYAFFGILVMTAVRKDNHMSTDDLFDRSLSMVYVSVMSRDRFDFLIRCLRMDDKSIRPTLRENDVFTPVAKIWDLFIHQCIQNYTPGAHLTIDEQLLGFAGACPFRVYIPNKPSKYGIKILMMCDSGTKYMINGMPYLGRGTQTNGVPLGEYYVKELSKPVHGSCRNITCDNWFTSIPLAKNLLQEPYKLTIVGTVASNKREIPEVLKNSRSRPVGTSMFCFDGPLTLVSYKPKPAKMVYLLSSCDEDASINESTGKPQMVMYYNQTKGGVDTLDQMCSVMTCSRKTNRAPMALLYGMINIACINSFIIYSHNVSSKGEKVQSRKKFMRNLYMGLTSSFMRKRLEAPTLKRYLRDNISNILPKEVPGTSDDSTEEPVMKKRTYCTYCPSKIRRKASASCKKCKKVICREHNIDVCQSCF

SEQ ID NO: 4 - protein, 594 aa, Artificial Sequence
  Modified hyperactive PiggyBac
MGSSLDDEHILSALLQSDDELVGEDSDSEVSDHVSEDDVQSDTEEAFIDEVHEVQPTSSGSEILDEQNVIEQPGSSLASNRILTLPQRTIRGKNKHCWSTSKPTRRSRVSALNIVRSQRGPTRMCRNIYDPLLCFKLFFTDEIISEIVKWTNAEISLKRRESMTSATFRDTNEDEIYAFFGILVMTAVRKDNHMSTDDLFDRSLSMVYVSVMSRDRFDFLIRCLRMDDKSIRPTLRENDVFTPVRKIWDLFIHQCIQNYTPGAHLTIDEQLLGFAGRCPFRVYIPNKPSKYGIKILMMCDSGTKYMINGMPYLGRGTQTNGVPLAEYYVKELSKPVHGSCRNITCDNWFTSIPLAKNLLQEPYKLTIVGTVASNKREIPEVLKNSRSRPVGTSMFCFDGPLTLVSYKPKPAKMVYLLSSCDEDASINESTGKPQMVMYYNQTKGGVDTLDQMCSVMTCSRKTNRWPMALLYGMINIACINSFIIYSHNVSSKGEKVQSRKKFMRNLYMGLTSSFMRKRLEAPTLKRYLRDNISNILPKEVPGTSDDSTEEPVMKKRTYCAYCPSKIRRKASASCKKCKKVICREHNIDMCQSCF

SEQ ID NO: 5 - protein, 594 aa, Artificial Sequence
  Modified hyperactive PiggyBac
MGSSLDDEHILSALLQSDDELVGEDSDSEVSDHVSEDDVQSDTEEAFIDEVHEVQPTSSGSEILDEQNVIEQPGSSLASNRILTLPQRTIRGKNKHCWSTSKPTRRSRVSALNIVRSQRGPTRMCRNIYDPLLCFKLFFTDEIISEIVKWTNAEISLKRRESMTSATFRDTNEDEIYAFFGILVMTAVRKDNHMSTDDLFDRSLSMVYVSVMSRDRFDFLIRCLRMDDKSIRPTLRENDVFTPVRKIWDLFIHQCIQNYTPGAHLTIDEQLLGFRGRCPFRVYIPNKPSKYGIKILMMCDSGTKYMINGMPYLGRGTQTNGVPLGEYYVKELSKPVHGSCRNITCDNWFTAIPLAKNLLQEPYKLTIVGTVASNAREIPEVLKNSRSAPVGTSMFCFDGPLTLVSYKPKPAKMVYLLSSCDEDASINESTGKPQMVMYYNQTKGGVDTLNQMCSVMTCSRKTNRAPMALLYGMINIACINSFIIYSHNVSSKGEKVQSRKKFMRNLYMGLTSSFMRKRLEAPTLKRYLRDNISNILPKEVPGTSDDSTEEPVMKKRTYCTYCPSKIRRKASAACKKCKKVICREHNIDVCQRCL

SEQ ID NO: 6 - protein, 594 aa, Artificial Sequence
  Modified hyperactive PiggyBac
MGSSLDDEHILSALLQSDDELVGEDSDSEVSDHVSEDDVQSDTEEAFIDEVHEVQPTSSGSEILDEQNVIEQPGSSLASNRILTLPQRTIRGKNKHCWSTSKPTRRSRVSALNIVRSQRGPTRMCRNIYDPLLCFKLFFTDEIISEIVKWTNAEISLKRRESMTSATFRDTNEDEIYAFFGILVMTAVRKDNHMSTDDLFDRSLSMVYVSVMSRDRFDFLIRCLRMDDKSIRPTLRENDVFTPVRKIWDLFIHQCIQNYTPGAHLTIDEQLLGFAGACPFRVYIPNKPSKYGIKILMMCDSGTKYMINGMPYLGRGTQTNGVPLGEYYVKELSKPVHGSCRNITCDSWFTSIPLAKNLLQEPYKLTIVGTVRSNAREIPEVLKNSRSAPVGTSMFCFDGPLTLVSYKPKPAKMVYLLSSCDEDASINESTGKPQMVMYYNQTKGGVDTLNQMCSVMTCSRKTNRAPMALLYGMINIACINSFIIYSHNVSSKGEKVQSRKKFMRNLYMGLTSSFMRKRLEAPTLKRYLRDNISNILPKEVPGTSDDSTEEPVMKKRTYCAYCPSKIRRKASAACKKCKKVICREHNIDVCQSCL

SEQ ID NO: 7 - protein, 594 aa, Artificial Sequence
  Modified hyperactive PiggyBac
MGSSLDDEHILSALLQSDDELVGEDSDSEVSDHVSEDDVQSDTEEAFIDEVHEVQPTSSGSEILDEQNVIEQPGSSLASNRILTLPQRTIRGKNKHCWSTSKPTRRSRVSALNIVRSQRGPTRMCRNIYDPLLCFKLFFTDEIISEIVKWTNAEISLKRRESMTSATFRDTNEDEIYAFFGILVMTAVRKDNHMSTDDLFDRSLSMVYVSVMSRDRFDFLIRCLRMDDKSIRPTLRENDVFTPVAKIWDLFIHQCIQNYTPGAHLTIDEQLLGFAGACPFRVYIPNKPSKYGIKILMMCDSGTKYMINGMPYLGRGTQTNGVPLGEYYVKELSKPVHGSCRNITCDNWFTSIPLAKNLLQEPYKLTIVGTVASNKREIPEVLKNSRSRPVGTSMFCFDGPLTLVSYKPKPAKMVYLLSSCDEDASINESTGKPQMVMYYNQTKGGVDTLDQMCSVMTCSRKTNRAPMALLYGMINIACINSFIIYSHNVSSKGEKVQSRKKFMRNLYMGLTSSFMRKRLEAPTLKRYLRDNISNILPKEVPGTSDDSTEEPVMKKRTYCTYCPSKIRRKASASCKKCKKVICREHNIDMCQSCF

SEQ ID NO: 8 - protein, 594 aa, Artificial Sequence
  Modified hyperactive PiggyBac
MGSSLDDEHILSALLQSDDELVGEDSDSEVSDHVSEDDVQSDTEEAFIDEVHEVQPTSSGSEILDEQNVIEQPGSSLASNRILTLPQRTIRGKNKHCWSTSKPTRRSRVSALNIVRSQRGPTRMCRNIYDPLLCFKLFFTDEIISEIVKWTNAEISLKRRESMTSATFRDTNEDEIYAFFGILVMTAVRKDNHMSTDDLFDRSLSMVYVSVMSRDRFDFLIRCLRMDDKSIRPTLRENDVFTPVRKIWDLFIHQCIQNYTPGAHLTIDEQLLGFRGRCPFRVYIPNKPSKYGIKILMMCDSGTKYMINGMPYLGRGTQTNGVPLGEYYVKELSKPVHGSCRNITCDNWFTSIPLAKNLLQEPYKLTIVGTVASNAREIPEVLKNSRSAPVGTSMFCFDGPLTLVSYKPKPAKMVYLLSSCDEDASINESTGKPQMVMYYNQTKGGVDTLNQMCSVMTCSRKTNRAPMALLYGMINIACINSFIIYSHNVSSKGEKVQSRKKFMRNLYMGLTSSFMRKRLEAPTLKRYLRDNISNILPKEVPGTSDDSTEEPVMKKRTYCTYCPSKIRRKASAACKKCKKVICREHNIDVCQRCL

SEQ ID NO: 9 - protein, 594 aa, Artificial Sequence
  Hyperactive PiggyBac aa sequence
MGSSLDDEHILSALLQSDDELVGEDSDSEVSDHVSEDDVQSDTEEAFIDEVHEVQPTSSGSEILDEQNVIEQPGSSLASNRILTLPQRTIRGKNKHCWSTSKPTRRSRVSALNIVRSQRGPTRMCRNIYDPLLCFKLFFTDEIISEIVKWTNAEISLKRRESMTSATFRDTNEDEIYAFFGILVMTAVRKDNHMSTDDLFDRSLSMVYVSVMSRDRFDFLIRCLRMDDKSIRPTLRENDVFTPVRKIWDLFIHQCIQNYTPGAHLTIDEQLLGFRGRCPFRVYIPNKPSKYGIKILMMCDSGTKYMINGMPYLGRGTQTNGVPLGEYYVKELSKPVHGSCRNITCDNWFTSIPLAKNLLQEPYKLTIVGTVRSNKREIPEVLKNSRSRPVGTSMFCFDGPLTLVSYKPKPAKMVYLLSSCDEDASINESTGKPQMVMYYNQTKGGVDTLDQMCSVMTCSRKTNRWPMALLYGMINIACINSFIIYSHNVSSKGEKVQSRKKFMRNLYMGLTSSFMRKRLEAPTLKRYLRDNISNILPKEVPGTSDDSTEEPVMKKRTYCTYCPSKIRRKASASCKKCKKVICREHNIDMCQSCF

SEQ ID NO: 10 - protein, 594 aa, Artificial Sequence
  Modified hyperactive PiggyBac
  SITE 245..245: Wherein amino acid can be Arg, Ala
  SITE 268..268: Wherein amino acid can be Asp, Asn
  SITE 275..275: Wherein amino acid can be Arg, Ala
  SITE 277..277: Wherein amino acid can be Arg, Ala
  SITE 287..287: Wherein amino acid can be Ala, Lys
  SITE 290..290: Wherein amino acid can be Ala, Lys
  SITE 315..315: Wherein amino acid can be Arg, Ala
  SITE 325..325: Wherein amino acid can be Gly, Ala
  SITE 341..341: Wherein amino acid can be Arg, Ala
  SITE 346..346: Wherein amino acid can be Asp, Asn
  SITE 347..347: Wherein amino acid can be Asn, Ala, Ser
  SITE 350..350: Wherein amino acid can be Thr, Ala
  SITE 351..351: Xaa can be Ser, Glu, Pro, Ala
  SITE 356..356: Wherein amino acid can be Lys, Glu
  SITE 357..357: Wherein amino acid can be Asn, Ala
  SITE 372..372: Wherein amino acid can be Arg, Ala
  SITE 375..375: Wherein amino acid can be Lys, Ala
  SITE 388..388: Wherein amino acid can be Arg, Ala
  SITE 409..409: Wherein amino acid can be Lys, Ala
  SITE 412..412: Wherein amino acid can be Lys, Ala
  SITE 432..432: Wherein amino acid can be Lys, Ala
  SITE 460..460: Wherein amino acid can be Arg, Ala
  SITE 461..461: Wherein amino acid can be Ala, Lys
  SITE 465..465: Wherein amino acid can be Trp, Ala
  SITE 560..560: Wherein amino acid can be Thr, Ala
  SITE 564..564: Wherein amino acid can be Ser, Pro
  SITE 571..571: Wherein amino acid can be Asn, Ser
  SITE 573..573: Wherein amino acid can be Ser, Ala
  SITE 576..576: Wherein amino acid can be Lys, Ala
  SITE 586..586: Wherein amino acid can be His, any naturally occuring amino acid
  SITE 587..587: Wherein amino acid can be Ile, Ala
  SITE 589..589: Wherein amino acid can be Met, Val
  SITE 592..592: Wherein amino acid can be Ser, Gly
  SITE 594..594: Wherein amino acid can be Phe, Leu
MGSSLDDEHILSALLQSDDELVGEDSDSEVSDHVSEDDVQSDTEEAFIDEVHEVQPTSSGSEILDEQNVIEQPGSSLASNRILTLPQRTIRGKNKHCWSTSKPTRRSRVSALNIVRSQRGPTRMCRNIYDPLLCFKLFFTDEIISEIVKWTNAEISLKRRESMTSATFRDTNEDEIYAFFGILVMTAVRKDNHMSTDDLFDRSLSMVYVSVMSRDRFDFLIRCLRMDDKSIRPTLRENDVFTPVXKIWDLFIHQCIQNYTPGAHLTIXEQLLGFXGXCPFRVYIPNXPSXYGIKILMMCDSGTKYMINGMPYLGXGTQTNGVPLXEYYVKELSKPVHGSCXNITCXXWFXXIPLAXXLLQEPYKLTIVGTVXSNXREIPEVLKNSRSXPVGTSMFCFDGPLTLVSYKPXPAXMVYLLSSCDEDASINESTGXPQMVMYYNQTKGGVDTLDQMCSVMTCSXXTNRXPMALLYGMINIACINSFIIYSHNVSSKGEKVQSRKKFMRNLYMGLTSSFMRKRLEAPTLKRYLRDNISNILPKEVPGTSDDSTEEPVMKKRTYCXYCPXKIRRKAXAXCKXCKKVICREHXXDXCQXCX

SEQ ID NO: 11 - protein, 594 aa, Artificial Sequence
  Modified hyperactive PiggyBac with mutations in the catalytic triad
  SITE 268..268: Xaa can be Asp, Asn
  SITE 346..346: Xaa can be Asp, Asn
MGSSLDDEHILSALLQSDDELVGEDSDSEVSDHVSEDDVQSDTEEAFIDEVHEVQPTSSGSEILDEQNVIEQPGSSLASNRILTLPQRTIRGKNKHCWSTSKPTRRSRVSALNIVRSQRGPTRMCRNIYDPLLCFKLFFTDEIISEIVKWTNAEISLKRRESMTSATFRDTNEDEIYAFFGILVMTAVRKDNHMSTDDLFDRSLSMVYVSVMSRDRFDFLIRCLRMDDKSIRPTLRENDVFTPVRKIWDLFIHQCIQNYTPGAHLTIXEQLLGFRGRCPFRVYIPNKPSKYGIKILMMCDSGTKYMINGMPYLGRGTQTNGVPLGEYYVKELSKPVHGSCRNITCXNWFTSIPLAKNLLQEPYKLTIVGTVRSNKREIPEVLKNSRSRPVGTSMFCFDGPLTLVSYKPKPAKMVYLLSSCDEDASINESTGKPQMVMYYNQTKGGVDTLDQMCSVMTCSRKTNRWPMALLYGMINIACINSFIIYSHNVSSKGEKVQSRKKFMRNLYMGLTSSFMRKRLEAPTLKRYLRDNISNILPKEVPGTSDDSTEEPVMKKRTYCTYCPSKIRRKASASCKKCKKVICREHNIDMCQSCF

SEQ ID NO: 12 - protein, 594 aa, Artificial Sequence
  Modified hyperactive PiggyBac with mutations in amino acids that are critical for excision
  SITE 287..287: Xaa can be Lys, Ala
  SITE 290..290: Xaa can be Lys, Ala
  SITE 460..460: Xaa can be Arg, Ala
  SITE 461..461: Xaa can be Lys, Ala
MGSSLDDEHILSALLQSDDELVGEDSDSEVSDHVSEDDVQSDTEEAFIDEVHEVQPTSSGSEILDEQNVIEQPGSSLASNRILTLPQRTIRGKNKHCWSTSKPTRRSRVSALNIVRSQRGPTRMCRNIYDPLLCFKLFFTDEIISEIVKWTNAEISLKRRESMTSATFRDTNEDEIYAFFGILVMTAVRKDNHMSTDDLFDRSLSMVYVSVMSRDRFDFLIRCLRMDDKSIRPTLRENDVFTPVRKIWDLFIHQCIQNYTPGAHLTIDEQLLGFRGRCPFRVYIPNXPSXYGIKILMMCDSGTKYMINGMPYLGRGTQTNGVPLGEYYVKELSKPVHGSCRNITCDNWFTSIPLAKNLLQEPYKLTIVGTVRSNKREIPEVLKNSRSRPVGTSMFCFDGPLTLVSYKPKPAKMVYLLSSCDEDASINESTGKPQMVMYYNQTKGGVDTLDQMCSVMTCSXXTNRWPMALLYGMINIACINSFIIYSHNVSSKGEKVQSRKKFMRNLYMGLTSSFMRKRLEAPTLKRYLRDNISNILPKEVPGTSDDSTEEPVMKKRTYCTYCPSKIRRKASASCKKCKKVICREHNIDMCQSCF

SEQ ID NO: 13 - protein, 594 aa, Artificial Sequence
  Modified hyperactive PiggyBac with mutation that are involved in target joining
  SITE 351..351: Xaa can be Ser, Glu, Pro, Ala
  SITE 356..356: Xaa can be Lys, Glu
MGSSLDDEHILSALLQSDDELVGEDSDSEVSDHVSEDDVQSDTEEAFIDEVHEVQPTSSGSEILDEQNVIEQPGSSLASNRILTLPQRTIRGKNKHCWSTSKPTRRSRVSALNIVRSQRGPTRMCRNIYDPLLCFKLFFTDEIISEIVKWTNAEISLKRRESMTSATFRDTNEDEIYAFFGILVMTAVRKDNHMSTDDLFDRSLSMVYVSVMSRDRFDFLIRCLRMDDKSIRPTLRENDVFTPVRKIWDLFIHQCIQNYTPGAHLTIDEQLLGFRGRCPFRVYIPNKPSKYGIKILMMCDSGTKYMINGMPYLGRGTQTNGVPLGEYYVKELSKPVHGSCRNITCDNWFTXIPLAXNLLQEPYKLTIVGTVRSNKREIPEVLKNSRSRPVGTSMFCFDGPLTLVSYKPKPAKMVYLLSSCDEDASINESTGKPQMVMYYNQTKGGVDTLDQMCSVMTCSRKTNRWPMALLYGMINIACINSFIIYSHNVSSKGEKVQSRKKFMRNLYMGLTSSFMRKRLEAPTLKRYLRDNISNILPKEVPGTSDDSTEEPVMKKRTYCTYCPSKIRRKASASCKKCKKVICREHNIDMCQSCF

SEQ ID NO: 14 - protein, 594 aa, Artificial Sequence
  Modified hyperactive PiggyBac with mutations that are critical for integration
  SITE 560..560: Wherein amino acid can be Thr, Ala,
  SITE 564..564: Wherein amino acid can be Ser, Pro
  SITE 571..571: Wherein amino acid can be Asn, Ser
  SITE 573..573: Wherein amino acid can be Ser, Ala
  SITE 589..589: Wherein amino acid can be Met, Val
  SITE 592..592: Wherein amino acid can be Ser, Gly
  SITE 594..594: Wherein amino acid can be Phe, Leu
MGSSLDDEHILSALLQSDDELVGEDSDSEVSDHVSEDDVQSDTEEAFIDEVHEVQPTSSGSEILDEQNVIEQPGSSLASNRILTLPQRTIRGKNKHCWSTSKPTRRSRVSALNIVRSQRGPTRMCRNIYDPLLCFKLFFTDEIISEIVKWTNAEISLKRRESMTSATFRDTNEDEIYAFFGILVMTAVRKDNHMSTDDLFDRSLSMVYVSVMSRDRFDFLIRCLRMDDKSIRPTLRENDVFTPVRKIWDLFIHQCIQNYTPGAHLTIDEQLLGFRGRCPFRVYIPNKPSKYGIKILMMCDSGTKYMINGMPYLGRGTQTNGVPLGEYYVKELSKPVHGSCRNITCDNWFTSIPLAKNLLQEPYKLTIVGTVRSNKREIPEVLKNSRSRPVGTSMFCFDGPLTLVSYKPKPAKMVYLLSSCDEDASINESTGKPQMVMYYNQTKGGVDTLDQMCSVMTCSRKTNRWPMALLYGMINIACINSFIIYSHNVSSKGEKVQSRKKFMRNLYMGLTSSFMRKRLEAPTLKRYLRDNISNILPKEVPGTSDDSTEEPVMKKRTYCXYCPXKIRRKAXAXCKKCKKVICREHNIDXCQXCX

SEQ ID NO: 15 - protein, 594 aa, Artificial Sequence
  Modified hyperactive PiggyBac with mutations that are involved in alignment
  SITE 325..325: Xaa can be Gly, Ala
  SITE 347..347: Xaa can be Asn, Ala, Ser
  SITE 350..350: Xaa can be Thr, Ala
  SITE 465..465: Xaa can be Trp, Ala
MGSSLDDEHILSALLQSDDELVGEDSDSEVSDHVSEDDVQSDTEEAFIDEVHEVQPTSSGSEILDEQNVIEQPGSSLASNRILTLPQRTIRGKNKHCWSTSKPTRRSRVSALNIVRSQRGPTRMCRNIYDPLLCFKLFFTDEIISEIVKWTNAEISLKRRESMTSATFRDTNEDEIYAFFGILVMTAVRKDNHMSTDDLFDRSLSMVYVSVMSRDRFDFLIRCLRMDDKSIRPTLRENDVFTPVRKIWDLFIHQCIQNYTPGAHLTIDEQLLGFRGRCPFRVYIPNKPSKYGIKILMMCDSGTKYMINGMPYLGRGTQTNGVPLXEYYVKELSKPVHGSCRNITCDXWFXSIPLAKNLLQEPYKLTIVGTVRSNKREIPEVLKNSRSRPVGTSMFCFDGPLTLVSYKPKPAKMVYLLSSCDEDASINESTGKPQMVMYYNQTKGGVDTLDQMCSVMTCSRKTNRXPMALLYGMINIACINSFIIYSHNVSSKGEKVQSRKKFMRNLYMGLTSSFMRKRLEAPTLKRYLRDNISNILPKEVPGTSDDSTEEPVMKKRTYCTYCPSKIRRKASASCKKCKKVICREHNIDMCQSCF

SEQ ID NO: 16 - protein, 594 aa, Artificial Sequence
  Modified hyperactive PiggyBac with mutations at well conserved amino acids
  SITE 576..576: Xaa can be lys, Ala
  SITE 587..587: Xaa can be Ile, Ala
MGSSLDDEHILSALLQSDDELVGEDSDSEVSDHVSEDDVQSDTEEAFIDEVHEVQPTSSGSEILDEQNVIEQPGSSLASNRILTLPQRTIRGKNKHCWSTSKPTRRSRVSALNIVRSQRGPTRMCRNIYDPLLCFKLFFTDEIISEIVKWTNAEISLKRRESMTSATFRDTNEDEIYAFFGILVMTAVRKDNHMSTDDLFDRSLSMVYVSVMSRDRFDFLIRCLRMDDKSIRPTLRENDVFTPVRKIWDLFIHQCIQNYTPGAHLTIDEQLLGFRGRCPFRVYIPNKPSKYGIKILMMCDSGTKYMINGMPYLGRGTQTNGVPLGEYYVKELSKPVHGSCRNITCDNWFTSIPLAKNLLQEPYKLTIVGTVRSNKREIPEVLKNSRSRPVGTSMFCFDGPLTLVSYKPKPAKMVYLLSSCDEDASINESTGKPQMVMYYNQTKGGVDTLDQMCSVMTCSRKTNRWPMALLYGMINIACINSFIIYSHNVSSKGEKVQSRKKFMRNLYMGLTSSFMRKRLEAPTLKRYLRDNISNILPKEVPGTSDDSTEEPVMKKRTYCTYCPSKIRRKASASCKXCKKVICREHNXDMCQSCF

SEQ ID NO: 17 - protein, 594 aa, Artificial Sequence
  Modified hyperactive PiggyBac with mutations involved in Zn2+ binding
  SITE 586..586: Wherein amino acid can be His, any naturally occuring amino acid
MGSSLDDEHILSALLQSDDELVGEDSDSEVSDHVSEDDVQSDTEEAFIDEVHEVQPTSSGSEILDEQNVIEQPGSSLASNRILTLPQRTIRGKNKHCWSTSKPTRRSRVSALNIVRSQRGPTRMCRNIYDPLLCFKLFFTDEIISEIVKWTNAEISLKRRESMTSATFRDTNEDEIYAFFGILVMTAVRKDNHMSTDDLFDRSLSMVYVSVMSRDRFDFLIRCLRMDDKSIRPTLRENDVFTPVRKIWDLFIHQCIQNYTPGAHLTIDEQLLGFRGRCPFRVYIPNKPSKYGIKILMMCDSGTKYMINGMPYLGRGTQTNGVPLGEYYVKELSKPVHGSCRNITCDNWFTSIPLAKNLLQEPYKLTIVGTVRSNKREIPEVLKNSRSRPVGTSMFCFDGPLTLVSYKPKPAKMVYLLSSCDEDASINESTGKPQMVMYYNQTKGGVDTLDQMCSVMTCSRKTNRWPMALLYGMINIACINSFIIYSHNVSSKGEKVQSRKKFMRNLYMGLTSSFMRKRLEAPTLKRYLRDNISNILPKEVPGTSDDSTEEPVMKKRTYCTYCPSKIRRKASASCKKCKKVICREHXIDMCQSCF

SEQ ID NO: 18 - protein, 594 aa, Artificial Sequence
  Modified hyperactive PiggyBac with mutations that are involved in integration
  SITE 315..315: Wherein amino acid can be Arg, Ala
  SITE 341..341: Wherein amino acid can be Arg, Ala
  SITE 372..372: Wherein amino acid can be Arg, Ala
  SITE 375..375: Wherein amino acid can be Lys, Ala
MGSSLDDEHILSALLQSDDELVGEDSDSEVSDHVSEDDVQSDTEEAFIDEVHEVQPTSSGSEILDEQNVIEQPGSSLASNRILTLPQRTIRGKNKHCWSTSKPTRRSRVSALNIVRSQRGPTRMCRNIYDPLLCFKLFFTDEIISEIVKWTNAEISLKRRESMTSATFRDTNEDEIYAFFGILVMTAVRKDNHMSTDDLFDRSLSMVYVSVMSRDRFDFLIRCLRMDDKSIRPTLRENDVFTPVRKIWDLFIHQCIQNYTPGAHLTIDEQLLGFRGRCPFRVYIPNKPSKYGIKILMMCDSGTKYMINGMPYLGXGTQTNGVPLGEYYVKELSKPVHGSCXNITCDNWFTSIPLAKNLLQEPYKLTIVGTVXSNXREIPEVLKNSRSRPVGTSMFCFDGPLTLVSYKPKPAKMVYLLSSCDEDASINESTGKPQMVMYYNQTKGGVDTLDQMCSVMTCSRKTNRWPMALLYGMINIACINSFIIYSHNVSSKGEKVQSRKKFMRNLYMGLTSSFMRKRLEAPTLKRYLRDNISNILPKEVPGTSDDSTEEPVMKKRTYCTYCPSKIRRKASASCKKCKKVICREHNIDMCQSCF

SEQ ID NO: 19 - protein, 897 aa, Artificial Sequence
  Cas9 from Corynebacterium ulcerans
MTNAVANHHVLWAKFDNVSEPYPLLAHLLDTATAATCLFNHWLRKGLRDRLSTELGPDAEKILGFVAGIHDLGKANPYFQAQRRNKKEEWITLRDAIQKAGFPLSNGTSALFEETKEKRRHENITLSILGWEITKFLQVKDVWPQLAIIGHHGNFSAPGFLSDEDDLEDIEDIFDDNGWSPTHELLVSSLLQAVGLEKQPEIKHISPASAILISGLVVLADRIASQSEMASDGLQALQKEELFFHQPEKWIANRKAFCREIIENTVGTYHPWESEAAGIRAVLGDYEPRFTQKAALNAGDGLFNVMETTGAGKTEAALLRHVKRKERLLFFLPTQATTNAIMDRIGKIFDGTPNVASLAHGLAVTEDFYAHPILPVQGSSDDANYKDNGGLYPTEFVRSAGTPRLLAPVCVGTIDQALMGALPSKFNHLRLLALANAHVVVDEVHTMDQYQSELMSGLLEWWSATDTPVTLLTATMPAWQREKFHLSYTGKDPHFKGVFPSLEDWSTPSKNTETSQENIPTEAFTIPINIDKIAHNEIVDSHVQWVIEQRKLFPQARIGIICNTVGRAQSIAEALAHESPIVLHSRMTAGHRKEAATKLEQAIGKKGTANATLVIGTQAIEASLDIDLDLLRTELCPAPSLIQRAGRLWRRLDPQREVRVPGMVGKKLTIAVVDSPSTGQTLPYLRSQLYRVESWLKQRDRIEFPADIQDFIDATTPGLQELFQKVSLPEDCGSAEEREALADDYLNEVASWVTKQRQAGTSRIDFAKHGKPRQVLASDCVVEDFLQITSANNLEESATRLIDYPSISAILCDPTGTIPGAWTDSVEKLIAISAKDSESLRRALRASISIPHSKKFLPITSREIPLSEAKTLLSGYSAVHIQPDEYDLQSGLKGPQK

SEQ ID NO: 20 - protein, 876 aa, Artificial Sequence
  Cas9 from Corynebacterium diphtheria
MNPHEELWAKQKGLAKPYPLLAHLLDSAAVAGALWDHWLRQDLRQMFIEELGSNAREIIQFVVGSHDIGKATPLFQYQKAQKGEVWDSIRYAIDRTGRYQKPLPSSYLVKKTSGGPNRHEQWSSFASKNEYLKPSAAAKENWIGLAIGGHHGRFEPVGYGRHQRKAAEDLAKSGWSAAQQDLLRALEKASGITRASLPSELSPELTLVLSGLTILADRISSTESFVITGARMIDDGTLHLATPIDWLKTRKLDSEKHVAKTVGIYHGWNNHESAIHSILKGYDPRPLQTIALQNQVGLLNLMAPTGNGKTEAAILRHSLKENDRLIFLLPTQATSNAIMRRVQGIYSDTPNAAALAHSLASVEDFYQTPLSVFDDHYDPSKEQFESSMSGGLYPSSFVCSGAARLLAPICIGTVDQALATALPGKWIHLRILALANAHIVIDEVHTLDHYQTALLENILPILAKLKTKITFLTATMPSWQRTKLLTAYGGEDLQIPPTVFPAAETVLPGQFNRTLIDSDSTTIDFTMEETSYDHLVESHVKWHQTTRLNAPHARIGLICNTVKRAQEIAAALEKTNDRIVLLHSRMTTEHRRRSAELLESLLGPNGNRKTITVVGTQAIEASLDIDLDILRTELCPAPSLVQRAGRVWRRNDPYRSSRITADHKPISVVFIAEAKDWQVLPYLRAETSRTQRWLEKHNQMFLPQMAQEFIDAATVDLDTATSEMDLDALALMGIHLMKADGAKARIQDVLNSDSKVSDFALLTSKNEIDEAQTRLIEEGTHLRIILGDENESIPGGWKHGLSSLLKLKASDRESLRTALLASIPLLVSEKQKQLLYQHNLVPLSSSKTVLAGFYFLPKAQNFYSKNLGFIWPEEKD

SEQ ID NO: 21 - protein, 773 aa, Artificial Sequence
  Cas9 from Spiroplasma syrphidicola
MNYKKLILGLDLGIASCGWAVTGQMEDGNWVLDDFGVRLFQTPENSKDGTTNAAARRLKRGARRLIKRRKNRIKDLKNLFEKINFINKASLDKYINEHSATNLVEDFNRHELYNPYFLRSIGITEKLTREELVWSLIHIANRRGYKNKFAFDIEGDGKKRETKLDEAISNALISSNLTISQEIVRNKKFRDAKNKKALLVRNKGGKEGENNFQFLFARDDYKKEVDLLLAKQAKFYPELTEEIRAKAADIIFRQRDFEDGPGPKKQELREIYKKENKQFSKNFTQLEGRCTFLRELSVGYKSSILFDLFHIISEVSKISKYIEENDQLAQDIISSFLYNEAGKKGKTLLKEILKKHHINDDIFDTNAYKNIDFKTNYLNLLKEVFGNDVLKNLSLNRLEDNIYHQLGFIIHTNITPERKEKAINQWLLENNIILAKEKLNILLKPNSSISTTVKTSFKWMSIAISNFLKGIPYGKFQAQFIKEDNFKLPESYAKQYQKYLTGEKTFEMFAPIIDPDLWRNPIVFRAINQARKVIKKLFEKYTFIDQINIELTREMGLSFSDRKKVKERQDDSLKENAKAKEFLMANGIIVNDTNVLKYKLWIQQNKKSLYSGKEITIADLGASNVLQIDHIIPYSKLADDSFNNKVLVFSKENQEKGNQFADQYVKSLGTENYNNYKKRVNYLLFQNQINQKKAEYLLCSNQNEEILNDFVSRNLNDTRYITRYVTNWLKAEFELQSRFGLAKPKIMTLNGAITSRFRRTWLRNSPWGLEKKS

SEQ ID NO: 22 - protein, 1380 aa, Artificial Sequence
  Cas9 from Prevotella intermedia
MKRILGLDLGTTSIGWALVNEAENNNEASSIVRLGVRVNPLTVDEKSNFEKGKAITTNADRQLRHGARINLQRYKLRRQNLHDCLQKQGWLGTEAMYEEGKASTFETYKLRAKAAEEEISLHEFARVLFMLNKKRGYKSNRKANNKEDGQLFDGMTIAKKLYEEHLTPAEYSLQLLNKGKKFTQGYYRSDLNAELERIWDEQKKYYPEILTDEFKQQLEGKTKTNTSKIFLAKYGIYSADLKGLDRKFQPLKWRVEALQQQVDKEVLAFVISDLKGQIANTSGLLGAISDRSKELYFNKQTVGQYLWASLEENPHISIKNKPFYRQDYLDEFEKIWETQAAFHKQLTPELKQEIRDIIIFYQRPLKSKKSLISVCELEQRKVKATIDGKEKEITIGPKVAPKSSPVFQEFRIWQNLNNVLLIDNDTNEKRPLDEVERNLLYKELSIKAKLSKTEALKILNKKGKQWDLNYRELEGNRTQAILFDCYNRIITLTGHEECDFKKIKASEIRHYVSTIFKNLGFSTEILDFDPSLKKHELEKQPMYQLWHLLYSYESDNSRTGNESLLRKLETTFGFPEEYATVLCDVVFEEDYGNLSVKAMREILPYLQAGNDYSQACAYAGYNHSRHSLTKEELDQKVYKERLELLPKNSLRNPVVEKILNQMINVINAIIDEYGKPDEIRIEMARELKSSAADRKKTTHAISQGNAENQRIREILEKEFSLSYISRNDIIKYKLYEELEPNYYKTLYSDTYITKDKLFSKDFDIEHIIPKARLFDDSFSNKTLEARNINLEKSNKTAFDFIKEKYGEDGAEAYKKKLDMLLENDAISRPKYNNLLRAEADIPSDFINRDLRNTQYIAKKACEILGELVKTVTPTTGKITNRLREDWQLVDVMKELNFEKYEKLGLTEIVEDRDGRKIKRIKDWTKRNDHRHHAMDALAIAFTKPSFIQYLNNLNARSNKGDSIYAIENKELHYEEGKLRFNAPIPVNEFRAEAKRHLSAILVSIKAKNKVMTQNVNKIKTKHGIIKKIQLTPRGPLHNETIYGTKMRPIIKMVKVGAALDEATINKVSSPAIREALLKRLNEYSGNAKKAFTGKNTLEKNPIYLNAGRTKTVPSLVKTVEWESFHPTRKLIDKDLNVDKVVDKGIREILKARLEEFNGDAKKAFSNLEENPIYLDEAKKIALKRVSIEGVLSAIPLHTLKNQAGKPITGKDGKPVLGNYVQTSNNHHIAFYYDEDGNLQDNAVSFFEAAERKSQGIPVIDKDYNRDKGWRFLFTMKQNEYFVFPNEATGFIPSEVDLTDEANYGIISPNLYRVQKVSRIDKGTSASRDYWFRHHLETILNDDAKLKNLAFKRIRGLLELKDIIKVRINSTGKIVAVGEYD

SEQ ID NO: 23 - protein, 535 aa, Artificial Sequence
  Cas9 from Spiroplasma taiwanense
MWSRKILKAGSRLFDEANLSDKIASKRREQRGRRRNLRRKITWKQDLINLFVKYNFLQKENDFYELDFNFDLLELRKKAINSKIELEQLLIILFNYIKHRGSFNYREDLSELKNISQEELETSSEFKLPVDIQFELKEENNKFREINNEKSLINHEWYVKEINLILDAQIENKLINLDFKKDYLKLFNRKREYYDGPGPKDKNLLNPSKYGWKNQEEFFDRFAGKDTYDSKEQRAPKHSLTSYLFNILNDLNNLSINGDRNQLTYENKKDLINLTLINQKEKAENITLKKIAKYLKINEKNITGYRLKPNSNESIFTVFESANKMRSILVKNNKSIDFICLENIDKIDKIVDILTKYQSIEDKSLKLEELNFDFFDKETCEKLAVISLTGTHALSKKTMSKLIEEMFHDNLNHMEALAKLKIKPDYKLKVDLTNFKTIPILREKINEMYISPVVKRALIESLKIIKELERHFKDFEIKDIVIEMAKKNSAEKKQFISKIQRQNVDLVKKLSNDYSLDENKLNFKMKEKFLLLSEQ

SEQ ID NO: 24 - protein, 1281 aa, Artificial Sequence
  Cas9 from Streptococcus iniae
MRKPYSIGLDIGTNSVGWAVITDDYKVPSKKMRIQGTTDRTSIKKNLIGALLFDNGETAEATRLKRTTRRRYTRRKYRIKELQKIFSSEMNELDIAFFPRLSESFLVSDDKEFENHPIFGNLKDEITYHNDYPTIYHLRQTLADSDQKADLRLIYLALAHIIKFRGHFLIEGNLDSENTDVHVLFLNLVNIYNNLFEEDIVETASIDAEKILTSKTSKSRRLENLIAEIPNQKRNMLFGNLVSLALGLTPNFKTNFELLEDAKLQISKDSYEEDLDNLLAQIGDQYADLFIAAKKLSDAILLSDIITVKGASTKAPLSASMVQRYEEHQQDLALLKNLVKKQIPEKYKEIFDNKEKNGYAGYIDGKTSQEEFYKYIKPILLKLDGTEKLISKLEREDFLRKQRTFDNGSIPHQIHLNELKAIIRRQEKFYPFLKENQKKIEKLFTFKIPYYVGPLANGQSSFAWLKRQSNESITPWNFEEVVDQEASARAFIERMTNFDTYLPEEKVLPKHSPLYEMFMVYNELTKVKYQTEGMKRPVFLSSEDKEEIVNLLFKKERKVTVKQLKEEYFSKMKCFHTVTILGVEDRFNASLGTYHDLLKIFKDKAFLDDEANQDILEEIVWTLTLFEDQAMIERRLVKYADVFEKSVLKKLKKRHYTGWGRLSQKLINGIKDKQTGKTILGFLKDDGVANRNFMQLINDSSLDFAKIIKNEQEKTIKNESLEETIANLAGSPAIKKGILQSIKIVDEIVKIMGQNPDNIVIEMARENQSTMQGIKNSRQRLRKLEEVHKNTGSKILKEYNVSNTQLQSDRLYLYLLQDGKDMYTGKELDYDNLSQYDIDHIIPQSFIKDNSIDNTVLTTQASNRGKSDNVPNIETVNKMKSFWYKQLKSGAISQRKFDHLTKAERGALSDFDKAGFIKRQLVETRQITKHVAQILDSRFNSNLTEDSKSNRNVKIITLKSKMVSDFRKDFGFYKLREVNDYHHAQDAYLNAVVGTALLKKYPKLEAEFVYGDYKHYDLAKLMIQPDSSLGKATTRMFFYSNLMNFFKKEIKLADDTIFTRPQIEVNTETGEIVWDKVKDMQTIRKVMSYPQVNIVMKTEVQTGGFSKESIWPKGDSDKLIARKKSWDPKKYGGFDSPIIAYSVLVVAKIAKGKTQKLKTIKELVGIKIMEQDEFEKDPIAFLEKKGYQDIQTSSIIKLPKYSLFELENGRKRLLASAKELQKGNELALPNKYVKFLYLASHYTKFTGKEEDREKKRSYVESHLYYFDVRLSQVFRVTNVEF

SEQ ID NO: 25 - protein, 1352 aa, Artificial Sequence
  Cas9 from Belliella baltica
MKKILGLDLGTTSIGWAFIKEPEKDVVGSEIVDMGVRIVPLSSDEENDFAKGNTISINADRTLKRGARRNLQRFKQRRNALLEIFKEKKLISTNFKYAEDGPSSTFSTLNLRAKAAKEKIELQDLVKVLLQINKKRGYKSSRKAKSEEDDGSAIDSMGIAKELYENDLTPGQWVYEALQKGRKNVPDFYRSDLQEEFKKIVNYQSEFFPDIFNASFVEDWMGKASTPTKQYFNKKGVQLAENKGKREERRLQEYKWRAEAVNFKIDLSEIALILSQINSQISNSSGYLGAISDRSKELYFKNLTVGQYLYQQIKKNPHTRLKGQVFYRQDYLDEFERIWSVQSSFYPQLNDALKREVRDITIFFQRRLKSQKHLISNCEFEDHHKVVPKSHPVFQEFRIWQNLNNLLLIKKDNLNEKFDLELESKIALANELAFKRELNVKDALKILGLKPNEWEFNFTKIEGNRTNQAFFDAFAKIIELEDGEPIDLGDLKADDILDQFSEAFLRIGIDTELLQVNSDIEGAEYEKQSYIQFWHLLYSSEDDQKLKLNLIRKFGFKPEHAKILASISLQDDHASLSSRAIKKILPHLQSGLIYDKACTYAGYNHSSSFTKDENEKRELRAELELLKKNSLRNPVVEKILNQMINVVNAILKDPELGRPDEIRVEMARELKANAEQRKNMTSNIASATRDHDKYREILKSEFGLKRVTKNDLLRYKLWLETDGISLYTGKPIEASKLFSKEYDIEHIIPKARLFDDSFSNKTICERQLNIDKANVTAFSFLQNKLSADEFEQYQSRVKSLYGKLSKAKIQKLLMANDKIPEDFIARQLQETRYISKKAKEILFEISRRVSVTTGTITDKLREDWGLVEIMKELNWEKYDKLGLTYTIEGKHGERLNKIKDWSKRNDHRHHAMDALTVALTKPAYIQYLNNLNAKGLNNKKGTEVFAIEQKYLKRENGKLCFIPPIENIRSEAKKHLSRILVSYKAKNKVVTINKNKTKSKAGLNEQIALTPRGQLHKETVYGKSFHYSTKFEKIGASFNVQKINTVAKKEEREALLKRLAENGNDPKKAFTGKNTLNKMPIYLDLGKNIKLSEKVKTVVLEQNYTIRKNIDPDLKVDKVIDVGIKRILESRLEEFGGNAKLAFSNLEENPIWLNKEKGISIKRVKISGVSNVESLHVKKDHFGEPILDQEGNEIPVDFVSTGNNHHVAIYEDENGNLQEEVVSFFEAVVRQNQGLPIIKKNHTLGWKFLFTLKQNEYFVFPSDDFVPADVDLMDEQNYHLISPNLFRVQKIARKNYVFNNHLETKAVDNDLLKSKKELSKITYHFYQTPEHLRGIIKIRINHLGKIIQIGEY

SEQ ID NO: 26 - protein, 1509 aa, Artificial Sequence
  Cas9 from Psychroflexus torquisI
MKRILGLDLGTNSIGWSLIEHDFKNKQGQIEGLGVRIIPMSQEILGKFDAGQSISQTADRTKYRGVRRLYQRDNLRRERLHRVLKILDFLPKHYSESIDFQDKVGQFKPKQEVKLNYRKNEKNKHEFVFMNSFIEMVSEFKNAQPELFYNKGNGEETKIPYDWTLYYLRKKALTQQITKEELAWLILNFNQKRGYYQLRGEDIDEDKNKKYMQLKVNNLIDSGAKVKGKVLYNVIFDNGWKYEKQIVNKDEWEGRTKEFIITTKTLKNGNIKRTYKAVDSEIDWAAIKAKTEQDINKANKTVGEYIYESLLDNPSQKIRGKLVKTIERKFYKEEFEKLLSKQIELQPELFNESLYKACIKELYPRNENHQSNNKKQGFEYLFTEDIIFYQRPLKSQKSNISGCQFEHKIYKQKNKKTGKLELIKEPIKTISRSHPLFQEFRIWQWLQNLKIYNKEKIENGKLEDVTTQLLPNNEAYVTLFDFLNTKKELEQKQFIEYFVKKKLIDKKEKEHFRWNFVEDKKYPFSETRAQFLSRLAKVKGIKNTEDFLNKNTQVGSKENSPFIKRIEQLWHIIYSVSDLKEYEKALEKFAEKHNLEKDSFLKNFKKFPPFVSDYASYSKKAISKLLPIMRMGKYWSESAVPTQVKERSLSIMERVKVLPLKEGYSDKDLADLLSRVSDDDIPKQLIKSFISFKDKNPLKGLNTYQANYLVYGRHSETGDIQHWKTPEDIDRYLNNFKQHSLRNPIVEQVVMETLRVVRDIWEHYGNNEKDFFKEIHVELGREMKSPAGKREKLSQRNTENENTNHRIREVLKELMNDASVEGGVRDYSPSQQEILKLYEEGIYQNPNTNYLKVDEDEILKIRKKNNPTQKEIQRYKLWLEQGYISPYTGKIIPLTKLFTHEYQIEHIIPQSRYYDNSLGNKIICESEVNEDKDNKTAYEYLKVEKGSIVFGHKLLNLDEYEAHVNKYFKKNKTKLKNLLSEDIPEGFINRQLNDSRYISKLVKGLLSNIVRENGEQEATSKNLIPVTGVVTSKLKQDWGLNDKWNEIIAPRFKRLNKLTNSNDFGFWDNDINAFRIQVPDSLIKGFSKKRIDHRHHALDALVVACTSRNHTHYLSALNAENKNYSLRDKLVIKNENGDYTKTFQIPWQGFTIEAKNNLEKTVVSFKKNLRVINKTNNKFWSYKDENGNLNLGKDGKPKKKLRKQTKGYNWAIRKPLHKETVSGIYNINAPKNKIATSVRTLLTEIKNEKHLAKITDLRIRETILPNHLKHYLNNKGEANFSEAFSQGGIEDLNKKITTLNEGKKHQPIYRVKIFEVGSKFSISEDENSAKSKKYVEAAKGTNLFFAIYLDEENKKRNYETIPLNEVITHQKQVAGFPKSERLSVQPDSQKGTFLFTLSPNDLVYVPNNEELENRDLFNLGNLNVEQISRIYKFTDSSDKTCNFIPFQVSKLIFNLKKKEQKKLDVDFIIQNEFGLGSPQSKNQKSIDDVMIKEKCIKLKIDRLGNISKA

SEQ ID NO: 27 - protein, 1388 aa, Artificial Sequence
  Cas9 from Streptococcus thermophilus
MTKPYSIGLDIGTNSVGWAVTTDNYKVPSKKMKVLGNTSKKYIKKNLLGVLLFDSGITAEGRRLKRTARRRYTRRRNRILYLQEIFSTEMATLDDAFFQRLDDSFLVPDDKRDSKYPIFGNLVEEKAYHDEFPTIYHLRKYLADSTKKADLRLVYLALAHMIKYRGHFLIEGEFNSKNNDIQKNFQDFLDTYNAIFESDLSLENSKQLEEIVKDKISKLEKKDRILKLFPGEKNSGIFSEFLKLIVGNQADFRKCFNLDEKASLHFSKESYDEDLETLLGYIGDDYSDVFLKAKKLYDAILLSGFLTVTDNETEAPLSSAMIKRYNEHKEDLALLKEYIRNISLKTYNEVFKDDTKNGYAGYIDGKTNQEDFYVYLKKLLAEFEGADYFLEKIDREDFLRKQRTFDNGSIPYQIHLQEMRAILDKQAKFYPFLAKNKERIEKILTFRIPYYVGPLARGNSDFAWSIRKRNEKITPWNFEDVIDKESSAEAFINRMTSFDLYLPEEKVLPKHSLLYETFNVYNELTKVRFIAESMRDYQFLDSKQKKDIVRLYFKDKRKVTDKDIIEYLHAIYGYDGIELKGIEKQFNSSLSTYHDLLNIINDKEFLDDSSNEAIIEEIIHTLTIFEDREMIKQRLSKFENIFDKSVLKKLSRRHYTGWGKLSAKLINGIRDEKSGNTILDYLIDDGISNRNFMQLIHDDALSFKKKIQKAQIIGDEDKGNIKEVVKSLPGSPAIKKGILQSIKIVDELVKVMGGRKPESIVVEMARENQYTNQGKSNSQQRLKRLEKSLKELGSKILKENIPAKLSKIDNNALQNDRLYLYYLQNGKDMYTGDDLDIDRLSNYDIDHIIPQAFLKDNSIDNKVLVSSASNRGKSDDVPSLEVVKKRKTFWYQLLKSKLISQRKFDNLTKAERGGLSPEDKAGFIQRQLVETRQITKHVARLLDEKFNNKKDENNRAVRTVKIITLKSTLVSQFRKDFELYKVREINDFHHAHDAYLNAVVASALLKKYPKLEPEFVYGDYPKYNSFRERKSATEKVYFYSNIMNIFKKSISLADGRVIERPLIEVNEETGESVWNKESDLATVRRVLSYPQVNVVKKVEEQNHGLDRGKPKGLFNANLSSKPKPNSNENLVGAKEYLDPKKYGGYAGISNSFTVLVKGTIEKGAKKKITNVLEFQGISILDRINYRKDKLNFLLEKGYKDIELIIELPKYSLFELSDGSRRMLASILSTNNKRGEIHKGNQIFLSQKFVKLLYHAKRISNTINENHRKYVENHKKEFEELFYYILEFNENYVGAKKNGKLLNSAFQSWQNHSIDELCSSFIGPTGSERKGLFELTSRGSAADFEFLGVKIPRYRDYTPSSLLKDATLIHQSVTGLYETRIDLAKLGEG

SEQ ID NO: 28 - protein, 1334 aa, Artificial Sequence
  Cas9 from Listeria innocua
MKKPYTIGLDIGTNSVGWAVLTDQYDLVKRKMKIAGDSEKKQIKKNFWGVRLFDEGQTAADRRMARTARRRIERRRNRISYLQGIFAEEMSKTDANFFCRLSDSFYVDNEKRNSRHPFFATIEEEVEYHKNYPTIYHLREELVNSSEKADLRLVYLALAHIIKYRGNFLIEGALDTQNTSVDGIYKQFIQTYNQVFASGIEDGSLKKLEDNKDVAKILVEKVTRKEKLERILKLYPGEKSAGMFAQFISLIVGSKGNFQKPFDLIEKSDIECAKDSYEEDLESLLALIGDEYAELFVAAKNAYSAVVLSSIITVAETETNAKLSASMIERFDTHEEDLGELKAFIKLHLPKHYEEIFSNTEKHGYAGYIDGKTKQADFYKYMKMTLENIEGADYFIAKIEKENFLRKQRTFDNGAIPHQLHLEELEAILHQQAKYYPFLKENYDKIKSLVTFRIPYFVGPLANGQSEFAWLTRKADGEIRPWNIEEKVDFGKSAVDFIEKMTNKDTYLPKENVLPKHSLCYQKYLVYNELTKVRYINDQGKTSYFSGQEKEQIFNDLFKQKRKVKKKDLELFLRNMSHVESPTIEGLEDSFNSSYSTYHDLLKVGIKQEILDNPVNTEMLENIVKILTVFEDKRMIKEQLQQFSDVLDGVVLKKLERRHYTGWGRLSAKLLMGIRDKQSHLTILDYLMNDDGLNRNLMQLINDSNLSFKSIIEKEQVTTADKDIQSIVADLAGSPAIKKGILQSLKIVDELVSVMGYPPQTIVVEMARENQTTGKGKNNSRPRYKSLEKAIKEFGSQILKEHPTDNQELRNNRLYLYYLQNGKDMYTGQDLDIHNLSNYDIDHIVPQSFITDNSIDNLVLTSSAGNREKGDDVPPLEIVRKRKVFWEKLYQGNLMSKRKFDYLTKAERGGLTEADKARFIHRQLVETRQITKNVANILHQRFNYEKDDHGNTMKQVRIVTLKSALVSQFRKQFQLYKVRDVNDYHHAHDAYLNGVVANTLLKVYPQLEPEFVYGDYHQFDWFKANKATAKKQFYTNIMLFFAQKDRIIDENGEILWDKKYLDTVKKVMSYRQMNIVKKTEIQKGEFSKATIKPKGNSSKLIPRKTNWDPMKYGGLDSPNMAYAVVIEYAKGKNKLVFEKKIIRVTIMERKAFEKDEKAFLEEQGYRQPKVLAKLPKYTLYECEEGRRRMLASANEAQKGNQQVLPNHLVTLLHHAANCEVSDGKSLDYIESNREMFAELLAHVSEFAKRYTLAEANLNKINQLFEQNKEGDIKAIAQSFVDLMAFNAMGAPASFKFFETTIERKRYNNLKELLNSTIIYQSITGLYESRKRLDD

SEQ ID NO: 29 - protein, 984 aa, Artificial Sequence
  Cas9 from Campylobacter jejuni
MARILAFDIGISSIGWAFSENDELKDCGVRIFTKVENPKTGESLALPRRLARSARKRLARRKARLNHLKHLIANEFKLNYEDYQSFDESLAKAYKGSLISPYELRFRALNELLSKQDFARVILHIAKRRGYDDIKNSDDKEKGAILKAIKQNEEKLANYQSVGEYLYKEYFQKFKENSKEFTNVRNKKESYERCIAQSFLKDELKLIFKKQREFGFSFSKKFEEEVLSVAFYKRALKDFSHLVGNCSFFTDEKRAPKNSPLAFMFVALTRIINLLNNLKNTEGILYTKDDLNALLNEVLKNGTLTYKQTKKLLGLSDDYEFKGEKGTYFIEFKKYKEFIKALGEHNLSQDDLNEIAKDITLIKDEIKLKKALAKYDLNQNQIDSLSKLEFKDHLNISFKALKLVTPLMLEGKKYDEACNELNLKVAINEDKKDFLPAFNETYYKDEVTNPVVLRAIKEYRKVLNALLKKYGKVHKINIELAREVGKNHSQRAKIEKEQNENYKAKKDAELECEKLGLKINSKNILKLRLFKEQKEFCAYSGEKIKISDLQDEKMLEIDHIYPYSRSFDDSYMNKVLVFTKQNQEKLNQTPFEAFGNDSAKWQKIEVLAKNLPTKKQKRILDKNYKDKEQKNFKDRNLNDTRYIARLVLNYTKDYLDFLPLSDDENTKLNDTQKGSKVHVEAKSGMLTSALRHTWGFSAKDRNNHLHHAIDAVIIAYANNSIVKAFSDFKKEQESNSAELYAKKISELDYKNKRKFFEPFSGFRQKVLDKIDEIFVSKPERKKPSGALHEETFRKEEEFYQSYGGKEGVLKALELGKIRKVNGKIVKNGDMFRVDIFKHKKTNKFYAVPIYTMDFALKVLPNKAVARSKKGEIKDWILMDENYEFCFSLYKDSLILIQTKDMQEPEFVYYNAFTSSTVSLIVSKHDNKFETLSKNQKILFKNANEKEVIAKSIGIQNLKVFEKYIVSALGEVTKAEFRQREDFKK

SEQ ID NO: 30 - protein, 1082 aa, Artificial Sequence
  Cas9 from Neisseria. meningitidis
MAAFKPNPINYILGLDIGIASVGWAMVEIDEDENPICLIDLGVRVFERAEVPKTGDSLAMARRLARSVRRLTRRRAHRLLRARRLLKREGVLQAADFDENGLIKSLPNTPWQLRAAALDRKLTPLEWSAVLLHLIKHRGYLSQRKNEGETADKELGALLKGVADNAHALQTGDFRTPAELALNKFEKESGHIRNQRGDYSHTFSRKDLQAELILLFEKQKEFGNPHVSGGLKEGIETLLMTQRPALSGDAVQKMLGHCTFEPAEPKAAKNTYTAERFIWLTKLNNLRILEQGSERPLTDTERATLMDEPYRKSKLTYAQARKLLGLEDTAFFKGLRYGKDNAEASTLMEMKAYHAISRALEKEGLKDKKSPLNLSPELQDEIGTAFSLFKTDEDITGRLKDRIQPEILEALLKHISFDKFVQISLKALRRIVPLMEQGKRYDEACAEIYGDHYGKKNTEEKIYLPPIPADEIRNPVVLRALSQARKVINGVVRRYGSPARIHIETAREVGKSFKDRKEIEKRQEENRKDREKAAAKFREYFPNFVGEPKSKDILKLRLYEQQHGKCLYSGKEINLGRLNEKGYVEIDHALPFSRTWDDSFNNKVLVLGSENQNKGNQTPYEYFNGKDNSREWQEFKARVETSRFPRSKKQRILLQKFDEDGFKERNLNDTRYVNRFLCQFVADRMRLTGKGKKRVFASNGQITNLLRGFWGLRKVRAENDRHHALDAVVVACSTVAMQQKITRFVRYKEMNAFDGKTIDKETGEVLHQKTHFPQPWEFFAQEVMIRVFGKPDGKPEFEEADTPEKLRTLLAEKLSSRPEAVHEYVTPLFVSRAPNRKMSGQGHMETVKSAKRLDEGVSVLRVPLTQLKLKDLEKMVNREREPKLYEALKARLEAHKDDPAKAFAEPFYKYDKAGNRTQQVKAVRVEQVQKTGVWVRNHNGIADNATMVRVDVFEKGDKYYLVPIYSWQVAKGILPDRAVVQGKDEEDWQLIDDSFNFKFSLHPNDLVEVITKKARMFGYFASCHRGTGNINIRIHDLDHKIGKNGILEGIGVKTALSFQKYQIDELGKEIRPCRLKKRPPVR

SEQ ID NO: 31 - protein, 1367 aa, Artificial Sequence
  Cas9 from Streptococcus pyogenes
MDKKYSIGLDIGTNSVGWAVITDDYKVPSKKFKVLGNTDRHSIKKNLIGALLFGSGETAEATRLKRTARRRYTRRKNRICYLQEIFSNEMAKVDDSFFHRLEESFLVEEDKKHERHPIFGNIVDEVAYHEKYPTIYHLRKKLADSTDKADLRLIYLALAHMIKFRGHFLIEGDLNPDNSDVDKLFIQLVQIYNQLFEENPINASRVDAKAILSARLSKSRRLENLIAQLPGEKRNGLFGNLIALSLGLTPNFKSNFDLAEDAKLQLSKDTYDDDLDNLLAQIGDQYADLFLAAKNLSDAILLSDILRVNSEITKAPLSASMIKRYDEHHQDLTLLKALVRQQLPEKYKEIFFDQSKNGYAGYIDGGASQEEFYKFIKPILEKMDGTEELLVKLNREDLLRKQRTFDNGSIPHQIHLGELHAILRRQEDFYPFLKDNREKIEKILTFRIPYYVGPLARGNSRFAWMTRKSEETITPWNFEEVVDKGASAQSFIERMTNFDKNLPNEKVLPKHSLLYEYFTVYNELTKVKYVTEGMRKPAFLSGEQKKAIVDLLFKTNRKVTVKQLKEDYFKKIECFDSVEISGVEDRFNASLGAYHDLLKIIKDKDFLDNEENEDILEDIVLTLTLFEDRGMIEERLKTYAHLFDDKVMKQLKRRRYTGWGRLSRKLINGIRDKQSGKTILDFLKSDGFANRNFMQLIHDDSLTFKEDIQKAQVSGQGHSLHEQIANLAGSPAIKKGILQTVKIVDELVKVMGHKPENIVIEMARENQTTQKGQKNSRERMKRIEEGIKELGSQILKEHPVENTQLQNEKLYLYYLQNGRDMYVDQELDINRLSDYDVDHIVPQSFIKDDSIDNKVLTRSDKNRGKSDNVPSEEVVKKMKNYWRQLLNAKLITQRKFDNLTKAERGGLSELDKAGFIKRQLVETRQITKHVAQILDSRMNTKYDENDKLIREVKVITLKSKLVSDFRKDFQFYKVREINNYHHAHDAYLNAVVGTALIKKYPKLESEFVYGDYKVYDVRKMIAKSEQEIGKATAKYFFYSNIMNFFKTEITLANGEIRKRPLIETNGETGEIVWDKGRDFATVRKVLSMPQVNIVKKTEVQTGGFSKESILPKRNSDKLIARKKDWDPKKYGGFDSPTVAYSVLVVAKVEKGKSKKLKSVKELLGITIMERSSFEKNPIDFLEAKGYKEVKKDLIIKLPKYSLFELENGRKRMLASAGELQKGNELALPSKYVNFLYLASHYEKLKGSPEDNEQKQLFVEQHKHYLDEIIEQISEFSKRVILADANLDKVLSAYNKHRDKPIREQAENIIHLFTLTNLGAPAAFKYFDTTIDRKRYTSTKEVLDATLIHQSITGLYETRIDLSQLGGD

SEQ ID NO: 32 - DNA, 528 bp, Artificial Sequence
  zfp coding sequence
atggcccaggctgctcttgagcccggagagaaaccctacaagtgcccggagtgcggaaagtccttctctgagcggagtcacctccgagagcaccagcggactcatacgggcgaaaaaccatacaagtgcccagaatgtggtaaatctttttctcgggctgacaacctgactgaacatcagcgcacgcacaccggtgaaaaaccttacaagtgtccagagtgtggcaagagcttttctagtagaaggacctgtcgagcgcatcagcggactcacaccggcgaaaaaccctataagtgtccggaatgtggaaagagctttagccgcaacgacacccttactgaacaccagcgaacacacacgggagaaaaaccatataaatgtccggaatgtggcaaaagttttagtcggagtgataaacttacggagcaccaacggacacacaccggagagaagccatataagtgtcctgaatgtggaaagtccttctcacagcttgctcatctgcgagcacatcagcgcacacacacc

SEQ ID NO: 33 - protein, 176 aa, Artificial Sequence
  ZFP amino acid sequence
MAQAALEPGEKPYKCPECGKSFSERSHLREHQRTHTGEKPYKCPECGKSFSRADNLTEHQRTHTGEKPYKCPECGKSFSSRRTCRAHQRTHTGEKPYKCPECGKSFSRNDTLTEHQRTHTGEKPYKCPECGKSFSRSDKLTEHQRTHTGEKPYKCPECGKSFSQLAHLRAHQRTHT

SEQ ID NO: 34 - DNA, 555 bp, Artificial Sequence
  ZNF-E2C Nucleotide
atggcgcaggcggcgctggaaccgggcgaaaaaccgtataaatgcccggaatgcggcaaaagctttagccgcaaagatagcctggtgcgccatcagcgcacccataccggcgaaaaaccgtataaatgcccggaatgcggcaaaagctttagccagagcggcgatctgcgccgccatcagcgcacccataccggcgaaaaaccgtataaatgcccggaatgcggcaaaagctttagcgattgccgcgatctggcgcgccatcagcgcacccataccggcgaaaaaccgtataaatgcccggaatgcggcaaaagctttagccagagcagccatctggtgcgccatcagcgcacccataccggcgaaaaaccgtataaatgcccggaatgcggcaaaagctttagcgattgccgcgatctggcgcgccatcagcgcacccataccggcgaaaaaccgtataaatgcccggaatgcggcaaaagctttagccgcagcgataaactggtgcgccatcagcgcacccataccggcaaaaaaaccagcggccaggcgggc

SEQ ID NO: 35 - protein, 185 aa, Artificial Sequence
  ZNF-E2C Aminoacid
MAQAALEPGEKPYKCPECGKSFSRKDSLVRHQRTHTGEKPYKCPECGKSFSQSGDLRRHQRTHTGEKPYKCPECGKSFSDCRDLARHQRTHTGEKPYKCPECGKSFSQSSHLVRHQRTHTGEKPYKCPECGKSFSDCRDLARHQRTHTGEKPYKCPECGKSFSRSDKLVRHQRTHTGKKTSGQAG

SEQ ID NO: 36 - DNA, 555 bp, Artificial Sequence
  ZNF-E3 Nucleotide
atggcgcaggcggcgctggaaccgggcgaaaaaccgtataaatgcccggaatgcggcaaaagctttagcgatccgggcgcgctggtgcgccatcagcgcacccataccggcgaaaaaccgtataaatgcccggaatgcggcaaaagctttagccagagcagccatctggtgcgccatcagcgcacccataccggcgaaaaaccgtataaatgcccggaatgcggcaaaagctttagcgattgccgcgatctggcgcgccatcagcgcacccataccggcgaaaaaccgtataaatgcccggaatgcggcaaaagctttagccagagcagccatctggtgcgccatcagcgcacccataccggcgaaaaaccgtataaatgcccggaatgcggcaaaagctttagcgattgccgcgatctggcgcgccatcagcgcacccataccggcgaaaaaccgtataaatgcccggaatgcggcaaaagctttagccagagcagccatctggtgcgccatcagcgcacccataccggcaaaaaaaccagcggccaggcgggc

SEQ ID NO: 37 - protein, 185 aa, Artificial Sequence
  ZNF-E3 Amino acid
MAQAALEPGEKPYKCPECGKSFSDPGALVRHQRTHTGEKPYKCPECGKSFSQSSHLVRHQRTHTGEKPYKCPECGKSFSDCRDLARHQRTHTGEKPYKCPECGKSFSQSSHLVRHQRTHTGEKPYKCPECGKSFSDCRDLARHQRTHTGEKPYKCPECGKSFSQSSHLVRHQRTHTGKKTSGQAG

SEQ ID NO: 38 - DNA, 528 bp, Artificial sequence
  ZNF-TRCa Nucleotide
atggcgcaggcggctcttgaacccggggagaaaccctataaatgccctgagtgtggcaagagtttttcaaccacaggaaacttgacagtccaccaacggacccacaccggcgagaaaccatacaagtgtccggagtgtggtaagtctttctcaagtcctgccgaccttaccagacatcaacgcacacatacaggtgaaaaaccttacaagtgcccagagtgcggaaaaagtttttcacaatctggcgacctccgcaggcaccagcgcactcacaccggtgaaaaaccatacaagtgtcctgagtgcgggaagagttttagtcaacgagctcatctggagcgacaccaaaggactcatactggggagaaaccgtacaaatgtcccgaatgtgggaagagcttctctaccaagaattcccttacagagcaccagcgcacgcatacgggagagaagccgtataagtgtccggaatgtggcaagagcttttccagaagtgaccaccttacaacccaccagaggacgcacacc

SEQ ID NO: 39 - protein, 176 aa, Artificial Sequence
  ZNF-TRCa Aminoacid
MAQAALEPGEKPYKCPECGKSFSTTGNLTVHQRTHTGEKPYKCPECGKSFSSPADLTRHQRTHTGEKPYKCPECGKSFSQSGDLRRHQRTHTGEKPYKCPECGKSFSQRAHLERHQRTHTGEKPYKCPECGKSFSTKNSLTEHQRTHTGEKPYKCPECGKSFSRSDHLTTHQRTHT

SEQ ID NO: 40 - DNA, 30 bp, Artificial Sequence
  GGS linker Nucleic Acid
ggtggatctggcggtggatctggtggcggt

SEQ ID NO: 41 - protein, 10 aa, Artificial Sequence
  GGS linker Amino Acid
GGSGGGSGGG

SEQ ID NO: 42 - DNA, 36 bp, Artificial Sequence
  GGS4x Linker Nucleic Acid
ggagggagtggtgggtccggtggtagtggcggatcc

SEQ ID NO: 43 - protein, 12 aa, Artificial Sequence
  GGS4x Linker Amino Acid
GGSGGSGGSGGS

SEQ ID NO: 44 - DNA, 45 bp, Artificial Sequence
  GGS5x Linker Nucleic Acid
ggaggctccggtgggtctggtgggagcggtggtagtggcggatcc

SEQ ID NO: 45 - protein, 15 aa, Artificial Sequence
  GGS5x Linker Amino Acid
GGSGGSGGSGGSGGS

SEQ ID NO: 46 - DNA, 54 bp, Artificial Sequence
  GGS6x Linker Nucleic Acid
ggaggcagtggtgggagcggtggttccgggggtagtggtggttccgggggatcc

SEQ ID NO: 47 - protein, 18 aa, Artificial Sequence
  GGS6x Linker Amino Acid
GGSGGSGGSGGSGGSGGS

SEQ ID NO: 48 - DNA, 63 bp, Artificial Sequence
  GGS7x Linker Nucleic Acid
ggaggttctggaggctccggtgggtccgggggaagtggggggtcaggcggatcaggaggatcc

SEQ ID NO: 49 - protein, 21 aa, Artificial Sequence
  GGS7x Linker Amino Acid
GGSGGSGGSGGSGGSGGSGGS

SEQ ID NO: 50 - DNA, 75 bp, Artificial Sequence
  GGS8x Linker Nucleic Acid
ggaggtagcggaggttccggagggagcggcgggagtgggggaagcgggggaagtggaggatccgggggaggatcc

SEQ ID NO: 51 - protein, 21 aa, Artificial Sequence
  GGS8x Linker Amino Acid
GGSGGSGGSGGSGGSGGSGGS

SEQ ID NO: 52 - DNA, 48 bp, Artificial Sequence
  Linker XTEN Nucleic Acid
tccggtagcgaaacaccggggacttcagaatcggccaccccggagtct

SEQ ID NO: 53 - protein, 16 aa, Artificial Sequence
  Linker XTEN Amino Acid
SGSETPGTSESATPES

SEQ ID NO: 54 - DNA, 36 bp, Artificial Sequence
  Linker B Nucleic Acid
ggaagcgccggtagtgcggctgggtctggcgagttc

SEQ ID NO: 55 - protein, 12 aa, Artificial Sequence
  Linker B Amino Acid
GSAGSAAGSGEF

SEQ ID NO: 56 - DNA, 4104 bp, Artificial Sequence
  human Cas9 (hCas9) nucleic acid
atggacaagaagtactccattgggctcgatatcggcacaaacagcgtcggctgggccgtcattacggacgagtacaaggtgccgagcaaaaaattcaaagttctgggcaataccgatcgccacagcataaagaagaacctcattggcgccctcctgttcgactccggggagacggccgaagccacgcggctcaaaagaacagcacggcgcagatatacccgcagaaagaatcggatctgctacctgcaggagatctttagtaatgagatggctaaggtggatgactctttcttccataggctggaggagtcctttttggtggaggaggataaaaagcacgagcgccacccaatctttggcaatatcgtggacgaggtggcgtaccatgaaaagtacccaaccatatatcatctgaggaagaagcttgtagacagtactgataaggctgacttgcggttgatctatctcgcgctggcgcatatgatcaaatttcggggacacttcctcatcgagggggacctgaacccagacaacagcgatgtcgacaaactctttatccaactggttcagacttacaatcagcttttcgaagagaacccgatcaacgcatccggagttgacgccaaagcaatcctgagcgctaggctgtccaaatcccggcggctcgaaaacctcatcgcacagctccctggggagaagaagaacggcctgtttggtaatcttatcgccctgtcactcgggctgacccccaactttaaatctaacttcgacctggccgaagatgccaagcttcaactgagcaaagacacctacgatgatgatctcgacaatctgctggcccagatcggcgaccagtacgcagacctttttttggcggcaaagaacctgtcagacgccattctgctgagtgatattctgcgagtgaacacggagatcaccaaagctccgctgagcgctagtatgatcaagcgctatgatgagcaccaccaagacttgactttgctgaaggcccttgtcagacagcaactgcctgagaagtacaaggaaattttcttcgatcagtctaaaaatggctacgccggatacattgacggcggagcaagccaggaggaattttacaaatttattaagcccatcttggaaaaaatggacggcaccgaggagctgctggtaaagcttaacagagaagatctgttgcgcaaacagcgcactttcgacaatggaagcatcccccaccagattcacctgggcgaactgcacgctatcctcaggcggcaagaggatttctacccctttttgaaagataacagggaaaagattgagaaaatcctcacatttcggataccctactatgtaggccccctcgcccggggaaattccagattcgcgtggatgactcgcaaatcagaagagaccatcactccctggaacttcgaggaagtcgtggataagggggcctctgcccagtccttcatcgaaaggatgactaactttgataaaaatctgcctaacgaaaaggtgcttcctaaacactctctgctgtacgagtacttcacagtttataacgagctcaccaaggtcaaatacgtcacagaagggatgagaaagccagcattcctgtctggagagcagaagaaagctatcgtggacctcctcttcaagacgaaccggaaagttaccgtgaaacagctcaaagaagactatttcaaaaagattgaatgtttcgactctgttgaaatcagcggagtggaggatcgcttcaacgcatccctgggaacgtatcacgatctcctgaaaatcattaaagacaaggacttcctggacaatgaggagaacgaggacattcttgaggacattgtcctcacccttacgttgtttgaagatagggagatgattgaagaacgcttgaaaacttacgctcatctcttcgacgacaaagtcatgaaacagctcaagaggcgccgatatacaggatgggggcggctgtcaagaaaactgatcaatgggatccgagacaagcagagtggaaagacaatcctggattttcttaagtccgatggatttgccaaccggaacttcatgcagttgatccatgatgactctctcacctttaaggaggacatccagaaagcacaagtttctggccagggggacagtcttcacgagcacatcgctaatcttgcaggtagcccagctatcaaaaagggaatactgcagaccgttaaggtcgtggatgaactcgtcaaagtaatgggaaggcataagcccgagaatatcgttatcgagatggcccgagagaaccaaactacccagaagggacagaagaacagtagggaaaggatgaagaggattgaagagggtataaaagaactggggtcccaaatccttaaggaacacccagttgaaaacacccagcttcagaatgagaagctctacctgtactacctgcagaacggcagggacatgtacgtggatcaggaactggacatcaatcggctctccgactacgacgtggatcatatcgtgccccagtcttttctcaaagatgattctattgataataaagtgttgacaagatccgataaaaatagagggaagagtgataacgtcccctcagaagaagttgtcaagaaaatgaaaaattattggcggcagctgctgaacgccaaactgatcacacaacggaagttcgataatctgactaaggctgaacgaggtggcctgtctgagttggataaagccggcttcatcaaaaggcagcttgttgagacacgccagatcaccaagcacgtggcccaaattctcgattcacgcatgaacaccaagtacgatgaaaatgacaaactgattcgagaggtgaaagttattactctgaagtctaagctggtctcagatttcagaaaggactttcagttttataaggtgagagagatcaacaattaccaccatgcgcatgatgcctacctgaatgcagtggtaggcactgcacttatcaaaaaatatcccaagcttgaatctgaatttgtttacggagactataaagtgtacgatgttaggaaaatgatcgcaaagtctgagcaggaaataggcaaggccaccgctaagtacttcttttacagcaatattatgaattttttcaagaccgagattacactggccaatggagagattcggaagcgaccacttatcgaaacaaacggagaaacaggagaaatcgtgtgggacaagggtagggatttcgcgacagtccggaaggtcctgtccatgccgcaggtgaacatcgttaaaaagaccgaagtacagaccggaggcttctccaaggaaagtatcctcccgaaaaggaacagcgacaagctgatcgcacgcaaaaaagattgggaccccaagaaatacggcggattcgattctcctacagtcgcttacagtgtactggttgtggccaaagtggagaaagggaagtctaaaaaactcaaaagcgtcaaggaactgctgggcatcacaatcatggagcgatcaagcttcgaaaaaaaccccatcgactttctcgaggcgaaaggatataaagaggtcaaaaaagacctcatcattaagcttcccaagtactctctctttgagcttgaaaacggccggaaacgaatgctcgctagtgcgggcgagctgcagaaaggtaacgagctggcactgccctctaaatacgttaatttcttgtatctggccagccactatgaaaagctcaaagggtctcccgaagataatgagcagaagcagctgttcgtggaacaacacaaacactaccttgatgagatcatcgagcaaataagcgaattctccaaaagagtgatcctcgccgacgctaacctcgataaggtgctttctgcttacaataagcacagggataagcccatcagggagcaggcagaaaacattatccacttgtttactctgaccaacttgggcgcgcctgcagccttcaagtacttcgacaccaccatagacagaaagcggtacacctctacaaaggaggtcctggacgccacactgattcatcagtcaattacggggctctatgaaacaagaatcgacctctctcagctcggtggagac

SEQ ID NO: 57 - DNA, 4104 bp, Artificial Sequence
  nickase Cas9 (nCas9) nucleic acid
atggacaagaagtactccattgggctcgctatcggcacaaacagcgtcggctgggccgtcattacggacgagtacaaggtgccgagcaaaaaattcaaagttctgggcaataccgatcgccacagcataaagaagaacctcattggcgccctcctgttcgactccggggagacggccgaagccacgcggctcaaaagaacagcacggcgcagatatacccgcagaaagaatcggatctgctacctgcaggagatctttagtaatgagatggctaaggtggatgactctttcttccataggctggaggagtcctttttggtggaggaggataaaaagcacgagcgccacccaatctttggcaatatcgtggacgaggtggcgtaccatgaaaagtacccaaccatatatcatctgaggaagaagcttgtagacagtactgataaggctgacttgcggttgatctatctcgcgctggcgcatatgatcaaatttcggggacacttcctcatcgagggggacctgaacccagacaacagcgatgtcgacaaactctttatccaactggttcagacttacaatcagcttttcgaagagaacccgatcaacgcatccggagttgacgccaaagcaatcctgagcgctaggctgtccaaatcccggcggctcgaaaacctcatcgcacagctccctggggagaagaagaacggcctgtttggtaatcttatcgccctgtcactcgggctgacccccaactttaaatctaacttcgacctggccgaagatgccaagcttcaactgagcaaagacacctacgatgatgatctcgacaatctgctggcccagatcggcgaccagtacgcagacctttttttggcggcaaagaacctgtcagacgccattctgctgagtgatattctgcgagtgaacacggagatcaccaaagctccgctgagcgctagtatgatcaagcgctatgatgagcaccaccaagacttgactttgctgaaggcccttgtcagacagcaactgcctgagaagtacaaggaaattttcttcgatcagtctaaaaatggctacgccggatacattgacggcggagcaagccaggaggaattttacaaatttattaagcccatcttggaaaaaatggacggcaccgaggagctgctggtaaagcttaacagagaagatctgttgcgcaaacagcgcactttcgacaatggaagcatcccccaccagattcacctgggcgaactgcacgctatcctcaggcggcaagaggatttctacccctttttgaaagataacagggaaaagattgagaaaatcctcacatttcggataccctactatgtaggccccctcgcccggggaaattccagattcgcgtggatgactcgcaaatcagaagagaccatcactccctggaacttcgaggaagtcgtggataagggggcctctgcccagtccttcatcgaaaggatgactaactttgataaaaatctgcctaacgaaaaggtgcttcctaaacactctctgctgtacgagtacttcacagtttataacgagctcaccaaggtcaaatacgtcacagaagggatgagaaagccagcattcctgtctggagagcagaagaaagctatcgtggacctcctcttcaagacgaaccggaaagttaccgtgaaacagctcaaagaagactatttcaaaaagattgaatgtttcgactctgttgaaatcagcggagtggaggatcgcttcaacgcatccctgggaacgtatcacgatctcctgaaaatcattaaagacaaggacttcctggacaatgaggagaacgaggacattcttgaggacattgtcctcacccttacgttgtttgaagatagggagatgattgaagaacgcttgaaaacttacgctcatctcttcgacgacaaagtcatgaaacagctcaagaggcgccgatatacaggatgggggcggctgtcaagaaaactgatcaatgggatccgagacaagcagagtggaaagacaatcctggattttcttaagtccgatggatttgccaacaggaacttcatgcagttgatccatgatgactctctcacctttaaggaggacatccagaaagcacaagtttctggccagggggacagtcttcacgagcacatcgctaatcttgcaggtagcccagctatcaaaaagggaatactgcagaccgttaaggtcgtggatgaactcgtcaaagtaatgggaaggcataagcccgagaatatcgttatcgagatggcccgagagaaccaaactacccagaagggacagaagaacagtagggaaaggatgaagaggattgaagagggtataaaagaactggggtcccaaatccttaaggaacacccagttgaaaacacccagcttcagaatgagaagctctacctgtactacctgcagaacggcagggacatgtacgtggatcaggaactggacatcaatcggctctccgactacgacgtggatcatatcgtgccccagtcttttctcaaagatgattctattgataataaagtgttgacaagatccgataaaaatagagggaagagtgataacgtcccctcagaagaagttgtcaagaaaatgaaaaattattggcggcagctgctgaacgccaaactgatcacacaacggaagttcgataatctgactaaggctgaacgaggtggcctgtctgagttggataaagccggcttcatcaaaaggcagcttgttgagacacgccagatcaccaagcacgtggcccaaattctcgattcacgcatgaacaccaagtacgatgaaaatgacaaactgattcgagaggtgaaagttattactctgaagtctaagctggtctcagatttcagaaaggactttcagttttataaggtgagagagatcaacaattaccaccatgcgcatgatgcctacctgaatgcagtggtaggcactgcacttatcaaaaaatatcccaagcttgaatctgaatttgtttacggagactataaagtgtacgatgttaggaaaatgatcgcaaagtctgagcaggaaataggcaaggccaccgctaagtacttcttttacagcaatattatgaattttttcaagaccgagattacactggccaatggagagattcggaagcgaccacttatcgaaacaaacggagaaacaggagaaatcgtgtgggacaagggtagggatttcgcgacagtccggaaggtcctgtccatgccgcaggtgaacatcgttaaaaagaccgaagtacagaccggaggcttctccaaggaaagtatcctcccgaaaaggaacagcgacaagctgatcgcacgcaaaaaagattgggaccccaagaaatacggcggattcgattctcctacagtcgcttacagtgtactggttgtggccaaagtggagaaagggaagtctaaaaaactcaaaagcgtcaaggaactgctgggcatcacaatcatggagcgatcaagcttcgaaaaaaaccccatcgactttctcgaggcgaaaggatataaagaggtcaaaaaagacctcatcattaagcttcccaagtactctctctttgagcttgaaaacggccggaaacgaatgctcgctagtgcgggcgagctgcagaaaggtaacgagctggcactgccctctaaatacgttaatttcttgtatctggccagccactatgaaaagctcaaagggtctcccgaagataatgagcagaagcagctgttcgtggaacaacacaaacactaccttgatgagatcatcgagcaaataagcgaattctccaaaagagtgatcctcgccgacgctaacctcgataaggtgctttctgcttacaataagcacagggataagcccatcagggagcaggcagaaaacattatccacttgtttactctgaccaacttgggcgcgcctgcagccttcaagtacttcgacaccaccatagacagaaagcggtacacctctacaaaggaggtcctggacgccacactgattcatcagtcaattacggggctctatgaaacaagaatcgacctctctcagctcggtggagac

SEQ ID NO: 58 - DNA, 3213 bp, Staphylococcus aureus
gccaccatggccccaaagaagaagcggaaggtcggtatccacggagtcccagcagccaagcggaactacatcctgggcctggccatcggcatcaccagcgtgggctacggcatcatcgactacgagacacgggacgtgatcgatgccggcgtgcggctgttcaaagaggccaacgtggaaaacaacgagggcaggcggagcaagagaggcgccagaaggctgaagcggcggaggcggcatagaatccagagagtgaagaagctgctgttcgactacaacctgctgaccgaccacagcgagctgagcggcatcaacccctacgaggccagagtgaagggcctgagccagaagctgagcgaggaagagttctctgccgccctgctgcacctggccaagagaagaggcgtgcacaacgtgaacgaggtggaagaggacaccggcaacgagctgtccaccaaagagcagatcagccggaacagcaaggccctggaagagaaatacgtggccgaactgcagctggaacggctgaagaaagacggcgaagtgcggggcagcatcaacagattcaagaccagcgactacgtgaaagaagccaaacagctgctgaaggtgcagaaggcctaccaccagctggaccagagcttcatcgacacctacatcgacctgctggaaacccggcggacctactatgagggacctggcgagggcagccccttcggctggaaggacatcaaagaatggtacgagatgctgatgggccactgcacctacttccccgaggaactgcggagcgtgaagtacgcctacaacgccgacctgtacaacgccctgaacgacctgaacaatctcgtgatcaccagggacgagaacgagaagctggaatattacgagaagttccagatcatcgagaacgtgttcaagcagaagaagaagcccaccctgaagcagatcgccaaagaaatcctcgtgaacgaagaggatattaagggctacagagtgaccagcaccggcaagcccgagttcaccaacctgaaggtgtaccacgacatcaaggacattaccgcccggaaagagattattgagaacgccgagctgctggatcagattgccaagatcctgaccatctaccagagcagcgaggacatccaggaagaactgaccaatctgaactccgagctgacccaggaagagatcgagcagatctctaatctgaagggctataccggcacccacaacctgagcctgaaggccatcaacctgatcctggacgagctgtggcacaccaacgacaaccagatcgctatcttcaaccggctgaagctggtgcccaagaaggtggacctgtcccagcagaaagagatccccaccaccctggtggacgacttcatcctgagccccgtcgtgaagagaagcttcatccagagcatcaaagtgatcaacgccatcatcaagaagtacggcctgcccaacgacatcattatcgagctggcccgcgagaagaactccaaggacgcccagaaaatgatcaacgagatgcagaagcggaaccggcagaccaacgagcggatcgaggaaatcatccggaccaccggcaaagagaacgccaagtacctgatcgagaagatcaagctgcacgacatgcaggaaggcaagtgcctgtacagcctggaagccatccctctggaagatctgctgaacaaccccttcaactatgaggtggaccacatcatccccagaagcgtgtccttcgacaacagcttcaacaacaaggtgctcgtgaagcaggaagaaaacagcaagaagggcaaccggaccccattccagtacctgagcagcagcgacagcaagatcagctacgaaaccttcaagaagcacatcctgaatctggccaagggcaagggcagaatcagcaagaccaagaaagagtatctgctggaagaacgggacatcaacaggttctccgtgcagaaagacttcatcaaccggaacctggtggataccagatacgccaccagaggcctgatgaacctgctgcggagctacttcagagtgaacaacctggacgtgaaagtgaagtccatcaatggcggcttcaccagctttctgcggcggaagtggaagtttaagaaagagcggaacaaggggtacaagcaccacgccgaggacgccctgatcattgccaacgccgatttcatcttcaaagagtggaagaaactggacaaggccaaaaaagtgatggaaaaccagatgttcgaggaaaagcaggccgagagcatgcccgagatcgaaaccgagcaggagtacaaagagatcttcatcaccccccaccagatcaagcacattaaggacttcaaggactacaagtacagccaccgggtggacaagaagcctaatagagagctgattaacgacaccctgtactccacccggaaggacgacaagggcaacaccctgatcgtgaacaatctgaacggcctgtacgacaaggacaatgacaagctgaaaaagctgatcaacaagagccccgaaaagctgctgatgtaccaccacgacccccagacctaccagaaactgaagctgattatggaacagtacggcgacgagaagaatcccctgtacaagtactacgaggaaaccgggaactacctgaccaagtactccaaaaaggacaacggccccgtgatcaagaagattaagtattacggcaacaaactgaacgcccatctggacatcaccgacgactaccccaacagcagaaacaaggtcgtgaagctgtccctgaagccctacagattcgacgtgtacctggacaatggcgtgtacaagttcgtgaccgtgaagaatctggatgtgatcaaaaaagaaaactactacgaagtgaatagcaagtgctatgaggaagctaagaagctgaagaagatcagcaaccaggccgagtttatcgcctccttctacaacaacgatctgatcaagatcaacggcgagctgtatagagtgatcggcgtgaacaacgacctgctgaaccggatcgaagtgaacatgatcgacatcacctaccgcgagtacctggaaaacatgaacgacaagaggccccccaggatcattaagacaatcgcctccaagacccagagcattaagaagtacagcacagacattctgggcaacctgtatgaagtgaaatctaagaagcaccctcagatcatcaaaaagggc

SEQ ID NO: 59 - DNA, 4104 bp, Artificial Sequence
  dead Cas9 (dCas9) nucleic acid
atggacaagaagtactccattgggctcgctatcggcacaaacagcgtcggctgggccgtcattacggacgagtacaaggtgccgagcaaaaaattcaaagttctgggcaataccgatcgccacagcataaagaagaacctcattggcgccctcctgttcgactccggggagacggccgaagccacgcggctcaaaagaacagcacggcgcagatatacccgcagaaagaatcggatctgctacctgcaggagatctttagtaatgagatggctaaggtggatgactctttcttccataggctggaggagtcctttttggtggaggaggataaaaagcacgagcgccacccaatctttggcaatatcgtggacgaggtggcgtaccatgaaaagtacccaaccatatatcatctgaggaagaagcttgtagacagtactgataaggctgacttgcggttgatctatctcgcgctggcgcatatgatcaaatttcggggacacttcctcatcgagggggacctgaacccagacaacagcgatgtcgacaaactctttatccaactggttcagacttacaatcagcttttcgaagagaacccgatcaacgcatccggagttgacgccaaagcaatcctgagcgctaggctgtccaaatcccggcggctcgaaaacctcatcgcacagctccctggggagaagaagaacggcctgtttggtaatcttatcgccctgtcactcgggctgacccccaactttaaatctaacttcgacctggccgaagatgccaagcttcaactgagcaaagacacctacgatgatgatctcgacaatctgctggcccagatcggcgaccagtacgcagacctttttttggcggcaaagaacctgtcagacgccattctgctgagtgatattctgcgagtgaacacggagatcaccaaagctccgctgagcgctagtatgatcaagcgctatgatgagcaccaccaagacttgactttgctgaaggcccttgtcagacagcaactgcctgagaagtacaaggaaattttcttcgatcagtctaaaaatggctacgccggatacattgacggcggagcaagccaggaggaattttacaaatttattaagcccatcttggaaaaaatggacggcaccgaggagctgctggtaaagcttaacagagaagatctgttgcgcaaacagcgcactttcgacaatggaagcatcccccaccagattcacctgggcgaactgcacgctatcctcaggcggcaagaggatttctacccctttttgaaagataacagggaaaagattgagaaaatcctcacatttcggataccctactatgtaggccccctcgcccggggaaattccagattcgcgtggatgactcgcaaatcagaagagaccatcactccctggaacttcgaggaagtcgtggataagggggcctctgcccagtccttcatcgaaaggatgactaactttgataaaaatctgcctaacgaaaaggtgcttcctaaacactctctgctgtacgagtacttcacagtttataacgagctcaccaaggtcaaatacgtcacagaagggatgagaaagccagcattcctgtctggagagcagaagaaagctatcgtggacctcctcttcaagacgaaccggaaagttaccgtgaaacagctcaaagaagactatttcaaaaagattgaatgtttcgactctgttgaaatcagcggagtggaggatcgcttcaacgcatccctgggaacgtatcacgatctcctgaaaatcattaaagacaaggacttcctggacaatgaggagaacgaggacattcttgaggacattgtcctcacccttacgttgtttgaagatagggagatgattgaagaacgcttgaaaacttacgctcatctcttcgacgacaaagtcatgaaacagctcaagaggcgccgatatacaggatgggggcggctgtcaagaaaactgatcaatgggatccgagacaagcagagtggaaagacaatcctggattttcttaagtccgatggatttgccaaccggaacttcatgcagttgatccatgatgactctctcacctttaaggaggacatccagaaagcacaagtttctggccagggggacagtcttcacgagcacatcgctaatcttgcaggtagcccagctatcaaaaagggaatactgcagaccgttaaggtcgtggatgaactcgtcaaagtaatgggaaggcataagcccgagaatatcgttatcgagatggcccgagagaaccaaactacccagaagggacagaagaacagtagggaaaggatgaagaggattgaagagggtataaaagaactggggtcccaaatccttaaggaacacccagttgaaaacacccagcttcagaatgagaagctctacctgtactacctgcagaacggcagggacatgtacgtggatcaggaactggacatcaatcggctctccgactacgacgtggctgctatcgtgccccagtcttttctcaaagatgattctattgataataaagtgttgacaagatccgataaagctagagggaagagtgataacgtcccctcagaagaagttgtcaagaaaatgaaaaattattggcggcagctgctgaacgccaaactgatcacacaacggaagttcgataatctgactaaggctgaacgaggtggcctgtctgagttggataaagccggcttcatcaaaaggcagcttgttgagacacgccagatcaccaagcacgtggcccaaattctcgattcacgcatgaacaccaagtacgatgaaaatgacaaactgattcgagaggtgaaagttattactctgaagtctaagctggtctcagatttcagaaaggactttcagttttataaggtgagagagatcaacaattaccaccatgcgcatgatgcctacctgaatgcagtggtaggcactgcacttatcaaaaaatatcccaagcttgaatctgaatttgtttacggagactataaagtgtacgatgttaggaaaatgatcgcaaagtctgagcaggaaataggcaaggccaccgctaagtacttcttttacagcaatattatgaattttttcaagaccgagattacactggccaatggagagattcggaagcgaccacttatcgaaacaaacggagaaacaggagaaatcgtgtgggacaagggtagggatttcgcgacagtccggaaggtcctgtccatgccgcaggtgaacatcgttaaaaagaccgaagtacagaccggaggcttctccaaggaaagtatcctcccgaaaaggaacagcgacaagctgatcgcacgcaaaaaagattgggaccccaagaaatacggcggattcgattctcctacagtcgcttacagtgtactggttgtggccaaagtggagaaagggaagtctaaaaaactcaaaagcgtcaaggaactgctgggcatcacaatcatggagcgatcaagcttcgaaaaaaaccccatcgactttctcgaggcgaaaggatataaagaggtcaaaaaagacctcatcattaagcttcccaagtactctctctttgagcttgaaaacggccggaaacgaatgctcgctagtgcgggcgagctgcagaaaggtaacgagctggcactgccctctaaatacgttaatttcttgtatctggccagccactatgaaaagctcaaagggtctcccgaagataatgagcagaagcagctgttcgtggaacaacacaaacactaccttgatgagatcatcgagcaaataagcgaattctccaaaagagtgatcctcgccgacgctaacctcgataaggtgctttctgcttacaataagcacagggataagcccatcagggagcaggcagaaaacattatccacttgtttactctgaccaacttgggcgcgcctgcagccttcaagtacttcgacaccaccatagacagaaagcggtacacctctacaaaggaggtcctggacgccacactgattcatcagtcaattacggggctctatgaaacaagaatcgacctctctcagctcggtggagac

SEQ ID NO: 60 - DNA, 3207 bp, Staphylococcus aureus
atggccccaaagaagaagcggaaggtcggtatccacggagtcccagcagccaagcggaactacatcctgggcctggacatcggcatcaccagcgtgggctacggcatcatcgactacgagacacgggacgtgatcgatgccggcgtgcggctgttcaaagaggccaacgtggaaaacaacgagggcaggcggagcaagagaggcgccagaaggctgaagcggcggaggcggcatagaatccagagagtgaagaagctgctgttcgactacaacctgctgaccgaccacagcgagctgagcggcatcaacccctacgaggccagagtgaagggcctgagccagaagctgagcgaggaagagttctctgccgccctgctgcacctggccaagagaagaggcgtgcacaacgtgaacgaggtggaagaggacaccggcaacgagctgtccaccaaagagcagatcagccggaacagcaaggccctggaagagaaatacgtggccgaactgcagctggaacggctgaagaaagacggcgaagtgcggggcagcatcaacagattcaagaccagcgactacgtgaaagaagccaaacagctgctgaaggtgcagaaggcctaccaccagctggaccagagcttcatcgacacctacatcgacctgctggaaacccggcggacctactatgagggacctggcgagggcagccccttcggctggaaggacatcaaagaatggtacgagatgctgatgggccactgcacctacttccccgaggaactgcggagcgtgaagtacgcctacaacgccgacctgtacaacgccctgaacgacctgaacaatctcgtgatcaccagggacgagaacgagaagctggaatattacgagaagttccagatcatcgagaacgtgttcaagcagaagaagaagcccaccctgaagcagatcgccaaagaaatcctcgtgaacgaagaggatattaagggctacagagtgaccagcaccggcaagcccgagttcaccaacctgaaggtgtaccacgacatcaaggacattaccgcccggaaagagattattgagaacgccgagctgctggatcagattgccaagatcctgaccatctaccagagcagcgaggacatccaggaagaactgaccaatctgaactccgagctgacccaggaagagatcgagcagatctctaatctgaagggctataccggcacccacaacctgagcctgaaggccatcaacctgatcctggacgagctgtggcacaccaacgacaaccagatcgctatcttcaaccggctgaagctggtgcccaagaaggtggacctgtcccagcagaaagagatccccaccaccctggtggacgacttcatcctgagccccgtcgtgaagagaagcttcatccagagcatcaaagtgatcaacgccatcatcaagaagtacggcctgcccaacgacatcattatcgagctggcccgcgagaagaactccaaggacgcccagaaaatgatcaacgagatgcagaagcggaaccggcagaccaacgagcggatcgaggaaatcatccggaccaccggcaaagagaacgccaagtacctgatcgagaagatcaagctgcacgacatgcaggaaggcaagtgcctgtacagcctggaagccatccctctggaagatctgctgaacaaccccttcaactatgaggtggaccacatcatccccagaagcgtgtccttcgacaacagcttcaacaacaaggtgctcgtgaagcaggaagaaaacagcaagaagggcaaccggaccccattccagtacctgagcagcagcgacagcaagatcagctacgaaaccttcaagaagcacatcctgaatctggccaagggcaagggcagaatcagcaagaccaagaaagagtatctgctggaagaacgggacatcaacaggttctccgtgcagaaagacttcatcaaccggaacctggtggataccagatacgccaccagaggcctgatgaacctgctgcggagctacttcagagtgaacaacctggacgtgaaagtgaagtccatcaatggcggcttcaccagctttctgcggcggaagtggaagtttaagaaagagcggaacaaggggtacaagcaccacgccgaggacgccctgatcattgccaacgccgatttcatcttcaaagagtggaagaaactggacaaggccaaaaaagtgatggaaaaccagatgttcgaggaaaagcaggccgagagcatgcccgagatcgaaaccgagcaggagtacaaagagatcttcatcaccccccaccagatcaagcacattaaggacttcaaggactacaagtacagccaccgggtggacaagaagcctaatagagagctgattaacgacaccctgtactccacccggaaggacgacaagggcaacaccctgatcgtgaacaatctgaacggcctgtacgacaaggacaatgacaagctgaaaaagctgatcaacaagagccccgaaaagctgctgatgtaccaccacgacccccagacctaccagaaactgaagctgattatggaacagtacggcgacgagaagaatcccctgtacaagtactacgaggaaaccgggaactacctgaccaagtactccaaaaaggacaacggccccgtgatcaagaagattaagtattacggcaacaaactgaacgcccatctggacatcaccgacgactaccccaacagcagaaacaaggtcgtgaagctgtccctgaagccctacagattcgacgtgtacctggacaatggcgtgtacaagttcgtgaccgtgaagaatctggatgtgatcaaaaaagaaaactactacgaagtgaatagcaagtgctatgaggaagctaagaagctgaagaagatcagcaaccaggccgagtttatcgcctccttctacaacaacgatctgatcaagatcaacggcgagctgtatagagtgatcggcgtgaacaacgacctgctgaaccggatcgaagtgaacatgatcgacatcacctaccgcgagtacctggaaaacatgaacgacaagaggccccccaggatcattaagacaatcgcctccaagacccagagcattaagaagtacagcacagacattctgggcaacctgtatgaagtgaaatctaagaagcaccctcagatcatcaaaaagggc

SEQ ID NO: 61 - DNA, 3708 bp, Artificial Sequence
  cpf1
atggccccaaagaagaagcggaaggtcagcaagctggagaagtttacaaactgctactccctgtctaagaccctgaggttcaaggccatccctgtgggcaagacccaggagaacatcgacaataagcggctgctggtggaggacgagaagagagccgaggattataagggcgtgaagaagctgctggatcgctactatctgtcttttatcaacgacgtgctgcacagcatcaagctgaagaatctgaacaattacatcagcctgttccggaagaaaaccagaaccgagaaggagaataaggagctggagaacctggagatcaatctgcggaaggagatcgccaaggccttcaagggcaacgagggctacaagtccctgtttaagaaggatatcatcgagacaatcctgccagagttcctggacgataaggacgagatcgccctggtgaacagcttcaatggctttaccacagccttcaccggcttctttgataacagagagaatatgttttccgaggaggccaagagcacatccatcgccttcaggtgtatcaacgagaatctgacccgctacatctctaatatggacatcttcgagaaggtggacgccatctttgataagcacgaggtgcaggagatcaaggagaagatcctgaacagcgactatgatgtggaggatttctttgagggcgagttctttaactttgtgctgacacaggagggcatcgacgtgtataacgccatcatcggcggcttcgtgaccgagagcggcgagaagatcaagggcctgaacgagtacatcaacctgtataatcagaaaaccaagcagaagctgcctaagtttaagccactgtataagcaggtgctgagcgatcgggagtctctgagcttctacggcgagggctatacatccgatgaggaggtgctggaggtgtttagaaacaccctgaacaagaacagcgagatcttcagctccatcaagaagctggagaagctgttcaagaattttgacgagtactctagcgccggcatctttgtgaagaacggccccgccatcagcacaatctccaaggatatcttcggcgagtggaacgtgatccgggacaagtggaatgccgagtatgacgatatccacctgaagaagaaggccgtggtgaccgagaagtacgaggacgatcggagaaagtccttcaagaagatcggctccttttctctggagcagctgcaggagtacgccgacgccgatctgtctgtggtggagaagctgaaggagatcatcatccagaaggtggatgagatctacaaggtgtatggctcctctgagaagctgttcgacgccgattttgtgctggagaagagcctgaagaagaacgacgccgtggtggccatcatgaaggacctgctggattctgtgaagagcttcgagaattacatcaaggccttctttggcgagggcaaggagacaaacagggacgagtccttctatggcgattttgtgctggcctacgacatcctgctgaaggtggaccacatctacgatgccatccgcaattatgtgacccagaagccctactctaaggataagttcaagctgtattttcagaaccctcagttcatgggcggctgggacaaggataaggagacagactatcgggccaccatcctgagatacggctccaagtactatctggccatcatggataagaagtacgccaagtgcctgcagaagatcgacaaggacgatgtgaacggcaattacgagaagatcaactataagctgctgcccggccctaataagatgctgccaaaggtgttcttttctaagaagtggatggcctactataaccccagcgaggacatccagaagatctacaagaatggcacattcaagaagggcgatatgtttaacctgaatgactgtcacaagctgatcgacttctttaaggatagcatctcccggtatccaaagtggtccaatgcctacgatttcaacttttctgagacagagaagtataaggacatcgccggcttttacagagaggtggaggagcagggctataaggtgagcttcgagtctgccagcaagaaggaggtggataagctggtggaggagggcaagctgtatatgttccagatctataacaaggacttttccgataagtctcacggcacacccaatctgcacaccatgtacttcaagctgctgtttgacgagaacaatcacggacagatcaggctgagcggaggagcagagctgttcatgaggcgcgcctccctgaagaaggaggagctggtggtgcacccagccaactcccctatcgccaacaagaatccagataatcccaagaaaaccacaaccctgtcctacgacgtgtataaggataagaggttttctgaggaccagtacgagctgcacatcccaatcgccatcaataagtgccccaagaacatcttcaagatcaatacagaggtgcgcgtgctgctgaagcacgacgataacccctatgtgatcggcatcgataggggcgagcgcaatctgctgtatatcgtggtggtggacggcaagggcaacatcgtggagcagtattccctgaacgagatcatcaacaacttcaacggcatcaggatcaagacagattaccactctctgctggacaagaaggagaaggagaggttcgaggcccgccagaactggacctccatcgagaatatcaaggagctgaaggccggctatatctctcaggtggtgcacaagatctgcgagctggtggagaagtacgatgccgtgatcgccctggaggacctgaactctggctttaagaatagccgcgtgaaggtggagaagcaggtgtatcagaagttcgagaagatgctgatcgataagctgaactacatggtggacaagaagtctaatccttgtgcaacaggcggcgccctgaagggctatcagatcaccaataagttcgagagctttaagtccatgtctacccagaacggcttcatcttttacatccctgcctggctgacatccaagatcgatccatctaccggctttgtgaacctgctgaaaaccaagtataccagcatcgccgattccaagaagttcatcagctcctttgacaggatcatgtacgtgcccgaggaggatctgttcgagtttgccctggactataagaacttctctcgcacagacgccgattacatcaagaagtggaagctgtactcctacggcaaccggatcagaatcttccggaatcctaagaagaacaacgtgttcgactgggaggaggtgtgcctgaccagcgcctataaggagctgttcaacaagtacggcatcaattatcagcagggcgatatcagagccctgctgtgcgagcagtccgacaaggccttctactctagctttatggccctgatgagcctgatgctgcagatgcggaacagcatcacaggccgcaccgacgtggattttctgatcagccctgtgaagaactccgacggcatcttctacgatagccggaactatgaggcccaggagaatgccatcctgccaaagaacgccgacgccaatggcgcctataacatcgccagaaaggtgctgtgggccatcggccagttcaagaaggccgaggacgagaagctggataaggtgaagatcgccatctctaacaaggagtggctggagtacgcccagaccagcgtgaagcac

SEQ ID NO: 62 - DNA, 2970 bp, Artificial Sequence
  CasX
atggccccaaagaagaagcggaaggtcagcatgcaagagatcaagagaatcaacaagatcagaaggagactggtcaaggacagcaacacaaagaaggccggcaagacaggccccatgaaaaccctgctcgtcagagtgatgacccctgacctgagagagcggctggaaaacctgagaaagaagcccgagaacatccctcagcctatcagcaacaccagcagggccaacctgaacaagctgctgaccgactacaccgagatgaagaaagccatcctgcacgtgtactgggaagagttccagaaagaccccgtgggcctgatgagcagagttgctcagcccgctcctaagaacatcgaccagagaaagctgatccccgtgaaggacggcaacgagagactgacctctagcggctttgcctgcagccagtgttgccagcctctgtacgtgtacaagctggaacaagtgaacgacaagggcaagccccacaccaactacttcggcagatgcaacgtgtccgagcacgagaggctgatcctgctgtctcctcacaagcccgaggccaacgatgagctggtcacatacagcctgggcaagttcggacagagagccctggacttctacagcatccacgtgaccagggagagcaatcaccctgtgaagcccctggaacagatcggcggcaatagctgtgcctctggacctgtgggaaaagccctgagcgacgcctgtatgggagccgtggcatccttcctgaccaagtaccaggacatcatcctggaacaccagaaagtgatcaagaagaacgagaaaagactggccaacctcaaggatatcgccagcgctaacggcctggcctttcctaagatcaccctgcctccacagcctcacaccaaagagggcatcgaggcctacaacaacgtggtggcccagatcgtgatttgggtcaacctgaatctgtggcagaagctgaagatcggcagggacgaagccaagccactgcagagactgaagggcttccctagcttccctctggtggaaagacaggccaatgaagtggattggtgggacatggtctgcaacgtgaagaagctgatcaacgagaagaaagaggatggcaaggttttctggcagaacctggccggctacaagagacaagaagccctgctgccttacctgagcagcgaagaggaccggaagaagggcaagaagttcgccagataccagttcggcgacctgctgctgcacctggaaaagaagcacggcgaggactggggcaaagtgtacgatgaggcctgggagagaatcgacaagaaggtggaaggcctgagcaagcacattaagctggaagaggaaagaaggagcgaggacgcccaatctaaagccgctctgaccgattggctgagagccaaggccagctttgtgatcgagggcctgaaagaggccgacaaggacgagttctgcagatgcgagctgaagctgcagaagtggtacggcgatctgagaggcaagcccttcgccattgaggccgagaacagcatcctggacatcagcggcttcagcaagcagtacaactgcgccttcatttggcagaaagacggcgtcaagaaactgaacctgtacctgatcatcaattacttcaaaggcggcaagctgcggttcaagaagatcaaacccgaggccttcgaggctaacagattctacaccgtgatcaacaaaaagtccggcgagatcgtgcccatggaagtgaacttcaacttcgacgaccccaacctgattatcctgcctctggccttcggcaagagacagggcagagagttcatctggaacgatctgctgagcctggaaaccggctctctgaagctggccaatggcagagtgatcgagaaaaccctgtacaacaggagaaccagacaggacgagcctgctctgtttgtggccctgaccttcgagagaagagaggtgctggacagcagcaacatcaagcccatgaacctgatcggcatcgaccggggcgagaatatccctgctgtgatcgccctgacagaccctgaaggatgcccactgagcagattcaaggactccctgggcaaccctacacacatcctgagaatcggcgagagctacaaagagaagcagaggacaatccaggccgccaaagaggtggaacagagaagagccggcggatactctaggaagtacgccagcaaggccaagaatctggccgacgacatggtccgaaacaccgccagagatctgctgtactacgccgtgacacaggacgccatgctgatcttcgagaatctgagcagaggcttcggccggcagggcaagagaacctttatggccgagaggcagtacaccagaatggaagattggctcacagctaaactggcctacgagggactgcccagcaagacctacctgtccaaaacactggcccagtatacctccaagacctgcagcaattgcggcttcaccatcaccagcgccgactacgacagagtgctggaaaagctcaagaaaaccgccaccggctggatgaccaccatcaacggcaaagagctgaaggttgagggccagatcacctactacaacaggtacaagaggcagaacgtcgtgaaggatctgagcgtggaactggacagactgagcgaagagagcgtgaacaacgacatcagcagctggacaaagggcagatcaggcgaggctctgagcctgctgaagaagaggtttagccacagacctgtgcaagagaagttcgtgtgcctgaactgcggcttcgagacacacgccgatgaacaggctgccctgaacattgccagaagctggctgttcctgagaagccaagagtacaagaagtaccagaccaacaagaccaccggcaacaccgacaagagggcctttgtggaaacctggcagagcttctacagaaaaaagctgaaagaagtctggaagcccgccgtgactagt

SEQ ID NO: 63 - DNA, 2976 bp, Campylobacter jejuni
atggccccaaagaagaagcggaaggtcgccagaatcctggccttcgacatcggcatcagcagcatcggctgggccttcagcgagaacgacgagctgaaggactgcggcgtgcggatcttcaccaaggtggaaaaccccaagaccggcgagagcctggccctgcccagaaggctggccagaagcgcccggaagagactggccagacggaaggcccggctgaaccacctgaagcacctgatcgccaacgagttcaagctgaactacgaggactaccagagcttcgacgagtccctggccaaggcctacaagggcagcctgatcagcccctacgagctgcggttccgggccctgaacgagctgctgagcaagcaggacttcgccagagtgatcctgcacattgccaagcggagaggctacgacgacatcaagaacagcgacgacaaagagaagggcgccatcctgaaggccatcaagcagaacgaggaaaagctggccaactaccagtccgtgggcgagtacctgtacaaagagtacttccagaagttcaaagagaacagcaaagaattcaccaacgtgcggaacaagaaagaaagctacgagcggtgtatcgcccagagcttcctgaaggatgagctgaagctgatcttcaagaagcagagagagttcggcttcagcttcagcaagaaattcgaggaagaggtgctgagcgtcgccttctacaagagagccctgaaggacttcagccacctcgtgggcaactgcagcttcttcaccgacgagaagagagcccccaagaacagccccctggccttcatgttcgtggccctgacccggatcatcaacctgctgaacaatctgaagaacaccgagggcatcctgtacaccaaggacgacctgaacgccctgctgaatgaggtgctgaagaacggcaccctgacctacaagcagaccaagaagctgctgggcctgagcgacgactacgagtttaagggcgagaagggcacctacttcatcgagttcaagaagtacaaagagttcatcaaggccctgggcgagcacaacctgagccaggacgatctgaatgagatcgccaaggacatcaccctgatcaaggacgagattaagctgaagaaggccctggccaaatacgacctgaatcagaaccagatcgacagcctgagcaagctggaattcaaggatcacctgaacatcagcttcaaggctctgaagctggtcacccccctgatgctggaaggcaagaagtacgacgaggcctgcaacgagctgaacctgaaggtggccatcaacgaggacaagaaggacttcctgcccgccttcaacgaaacctactacaaggacgaagtgaccaaccccgtggtgctgcgggccatcaaagaataccggaaggtgctgaatgccctgctcaagaaatacggcaaggtgcacaagatcaacatcgagctggcccgggaagtgggcaagaaccacagccagcgggccaagatcgagaaagagcagaacgaaaactacaaggccaagaaggacgctgagctggaatgcgagaagctgggactgaagatcaacagcaagaacatcctgaagctgcggctgttcaaagaacagaaagagttctgcgcctacagcggcgagaagatcaagatcagcgatctgcaggacgagaagatgctggaaatcgaccacatctacccctacagccggtccttcgacgacagctacatgaacaaggtgctggtgttcaccaaacagaaccaggaaaaactgaaccagacccccttcgaggccttcggcaacgacagcgccaagtggcagaaaatcgaggtgctggccaagaacctgcccaccaagaaacagaagagaatcctggacaagaattacaaggacaaagagcagaagaacttcaaggaccggaacctgaacgacacccggtatatcgcccggctggtgctgaactacacaaaggactacctggatttcctgcccctgtccgacgacgagaacaccaagctgaacgatacccagaaaggctccaaggtgcacgtggaagccaagagcggcatgctgaccagcgccctgagacacacctggggcttcagcgccaaggatcggaacaaccatctgcaccacgccatcgacgccgtgatcattgcctacgccaacaacagcatcgtgaaggccttctccgacttcaagaaagaacaggaaagcaacagcgccgagctgtacgccaagaagatctctgagctggactacaagaacaagcggaagttcttcgagcccttcagcggcttccggcagaaggtgctggataagatcgacgagatcttcgtgtccaagcccgagcggaagaagccctctggcgccctgcacgaggaaaccttcagaaaagaggaagagttctaccagtcctacggcggcaaagaaggcgtgctgaaggccctcgagctgggcaagatcagaaaagtgaacggcaagatcgtgaagaacggggacatgttccgggtggacatcttcaagcacaaaaagaccaacaagttctacgccgtgcccatctacaccatggacttcgccctgaaggtgctgcccaacaaggccgtggcccggtccaagaagggcgagatcaaggactggattctgatggacgagaactacgagttctgctttagcctgtacaaggactccctgatcctgatccagaccaaggacatgcaggaacccgagttcgtctactacaacgccttcaccagcagcaccgtgtccctgatcgtgtctaagcacgacaacaagttcgagacactgagcaagaaccagaagatcctgttcaagaacgccaacgagaaagaagtgatcgccaagagcatcggcatccagaatctgaaggtgttcgagaagtacatcgtgtccgccctgggagaagtgacaaaggccgagttccggcagagagaggacttcaaaaag

SEQ ID NO: 64 - protein, 1368 aa, Artificial Sequence [sequence omitted]

SEQ ID NO: 65 - protein, 1368 aa, Artificial Sequence
  nickase Cas9 (nCas9) amino acid
MDKKYSIGLAIGTNSVGWAVITDEYKVPSKKFKVLGNTDRHSIKKNLIGALLFDSGETAEATRLKRTARRRYTRRKNRICYLQEIFSNEMAKVDDSFFHRLEESFLVEEDKKHERHPIFGNIVDEVAYHEKYPTIYHLRKKLVDSTDKADLRLIYLALAHMIKFRGHFLIEGDLNPDNSDVDKLFIQLVQTYNQLFEENPINASGVDAKAILSARLSKSRRLENLIAQLPGEKKNGLFGNLIALSLGLTPNFKSNFDLAEDAKLQLSKDTYDDDLDNLLAQIGDQYADLFLAAKNLSDAILLSDILRVNTEITKAPLSASMIKRYDEHHQDLTLLKALVRQQLPEKYKEIFFDQSKNGYAGYIDGGASQEEFYKFIKPILEKMDGTEELLVKLNREDLLRKQRTFDNGSIPHQIHLGELHAILRRQEDFYPFLKDNREKIEKILTFRIPYYVGPLARGNSRFAWMTRKSEETITPWNFEEVVDKGASAQSFIERMTNFDKNLPNEKVLPKHSLLYEYFTVYNELTKVKYVTEGMRKPAFLSGEQKKAIVDLLFKTNRKVTVKQLKEDYFKKIECFDSVEISGVEDRFNASLGTYHDLLKIIKDKDFLDNEENEDILEDIVLTLTLFEDREMIEERLKTYAHLFDDKVMKQLKRRRYTGWGRLSRKLINGIRDKQSGKTILDFLKSDGFANRNFMQLIHDDSLTFKEDIQKAQVSGQGDSLHEHIANLAGSPAIKKGILQTVKVVDELVKVMGRHKPENIVIEMARENQTTQKGQKNSRERMKRIEEGIKELGSQILKEHPVENTQLQNEKLYLYYLQNGRDMYVDQELDINRLSDYDVDHIVPQSFLKDDSIDNKVLTRSDKNRGKSDNVPSEEVVKKMKNYWRQLLNAKLITQRKFDNLTKAERGGLSELDKAGFIKRQLVETRQITKHVAQILDSRMNTKYDENDKLIREVKVITLKSKLVSDFRKDFQFYKVREINNYHHAHDAYLNAVVGTALIKKYPKLESEFVYGDYKVYDVRKMIAKSEQEIGKATAKYFFYSNIMNFFKTEITLANGEIRKRPLIETNGETGEIVWDKGRDFATVRKVLSMPQVNIVKKTEVQTGGFSKESILPKRNSDKLIARKKDWDPKKYGGFDSPTVAYSVLVVAKVEKGKSKKLKSVKELLGITIMERSSFEKNPIDFLEAKGYKEVKKDLIIKLPKYSLFELENGRKRMLASAGELQKGNELALPSKYVNFLYLASHYEKLKGSPEDNEQKQLFVEQHKHYLDEIIEQISEFSKRVILADANLDKVLSAYNKHRDKPIREQAENIIHLFTLTNLGAPAAFKYFDTTIDRKRYTSTKEVLDATLIHQSITGLYETRIDLSQLGGD

SEQ ID NO: 66 - protein, 1069 aa, Staphylococcus aureus
MAPKKKRKVGIHGVPAAKRNYILGLAIGITSVGYGIIDYETRDVIDAGVRLFKEANVENNEGRRSKRGARRLKRRRRHRIQRVKKLLFDYNLLTDHSELSGINPYEARVKGLSQKLSEEEFSAALLHLAKRRGVHNVNEVEEDTGNELSTKEQISRNSKALEEKYVAELQLERLKKDGEVRGSINRFKTSDYVKEAKQLLKVQKAYHQLDQSFIDTYIDLLETRRTYYEGPGEGSPFGWKDIKEWYEMLMGHCTYFPEELRSVKYAYNADLYNALNDLNNLVITRDENEKLEYYEKFQIIENVFKQKKKPTLKQIAKEILVNEEDIKGYRVTSTGKPEFTNLKVYHDIKDITARKEIIENAELLDQIAKILTIYQSSEDIQEELTNLNSELTQEEIEQISNLKGYTGTHNLSLKAINLILDELWHTNDNQIAIFNRLKLVPKKVDLSQQKEIPTTLVDDFILSPVVKRSFIQSIKVINAIIKKYGLPNDIIIELAREKNSKDAQKMINEMQKRNRQTNERIEEIIRTTGKENAKYLIEKIKLHDMQEGKCLYSLEAIPLEDLLNNPFNYEVDHIIPRSVSFDNSFNNKVLVKQEENSKKGNRTPFQYLSSSDSKISYETFKKHILNLAKGKGRISKTKKEYLLEERDINRFSVQKDFINRNLVDTRYATRGLMNLLRSYFRVNNLDVKVKSINGGFTSFLRRKWKFKKERNKGYKHHAEDALIIANADFIFKEWKKLDKAKKVMENQMFEEKQAESMPEIETEQEYKEIFITPHQIKHIKDFKDYKYSHRVDKKPNRELINDTLYSTRKDDKGNTLIVNNLNGLYDKDNDKLKKLINKSPEKLLMYHHDPQTYQKLKLIMEQYGDEKNPLYKYYEETGNYLTKYSKKDNGPVIKKIKYYGNKLNAHLDITDDYPNSRNKVVKLSLKPYRFDVYLDNGVYKFVTVKNLDVIKKENYYEVNSKCYEEAKKLKKISNQAEFIASFYNNDLIKINGELYRVIGVNNDLLNRIEVNMIDITYREYLENMNDKRPPRIIKTIASKTQSIKKYSTDILGNLYEVKSKKHPQIIKKG

SEQ ID NO: 67 - protein, 1368 aa, Artificial Sequence
  dead Cas9 (dCas9) amino acid
MDKKYSIGLAIGTNSVGWAVITDEYKVPSKKFKVLGNTDRHSIKKNLIGALLFDSGETAEATRLKRTARRRYTRRKNRICYLQEIFSNEMAKVDDSFFHRLEESFLVEEDKKHERHPIFGNIVDEVAYHEKYPTIYHLRKKLVDSTDKADLRLIYLALAHMIKFRGHFLIEGDLNPDNSDVDKLFIQLVQTYNQLFEENPINASGVDAKAILSARLSKSRRLENLIAQLPGEKKNGLFGNLIALSLGLTPNFKSNFDLAEDAKLQLSKDTYDDDLDNLLAQIGDQYADLFLAAKNLSDAILLSDILRVNTEITKAPLSASMIKRYDEHHQDLTLLKALVRQQLPEKYKEIFFDQSKNGYAGYIDGGASQEEFYKFIKPILEKMDGTEELLVKLNREDLLRKQRTFDNGSIPHQIHLGELHAILRRQEDFYPFLKDNREKIEKILTFRIPYYVGPLARGNSRFAWMTRKSEETITPWNFEEVVDKGASAQSFIERMTNFDKNLPNEKVLPKHSLLYEYFTVYNELTKVKYVTEGMRKPAFLSGEQKKAIVDLLFKTNRKVTVKQLKEDYFKKIECFDSVEISGVEDRFNASLGTYHDLLKIIKDKDFLDNEENEDILEDIVLTLTLFEDREMIEERLKTYAHLFDDKVMKQLKRRRYTGWGRLSRKLINGIRDKQSGKTILDFLKSDGFANRNFMQLIHDDSLTFKEDIQKAQVSGQGDSLHEHIANLAGSPAIKKGILQTVKVVDELVKVMGRHKPENIVIEMARENQTTQKGQKNSRERMKRIEEGIKELGSQILKEHPVENTQLQNEKLYLYYLQNGRDMYVDQELDINRLSDYDVAAIVPQSFLKDDSIDNKVLTRSDKARGKSDNVPSEEVVKKMKNYWRQLLNAKLITQRKFDNLTKAERGGLSELDKAGFIKRQLVETRQITKHVAQILDSRMNTKYDENDKLIREVKVITLKSKLVSDFRKDFQFYKVREINNYHHAHDAYLNAVVGTALIKKYPKLESEFVYGDYKVYDVRKMIAKSEQEIGKATAKYFFYSNIMNFFKTEITLANGEIRKRPLIETNGETGEIVWDKGRDFATVRKVLSMPQVNIVKKTEVQTGGFSKESILPKRNSDKLIARKKDWDPKKYGGFDSPTVAYSVLVVAKVEKGKSKKLKSVKELLGITIMERSSFEKNPIDFLEAKGYKEVKKDLIIKLPKYSLFELENGRKRMLASAGELQKGNELALPSKYVNFLYLASHYEKLKGSPEDNEQKQLFVEQHKHYLDEIIEQISEFSKRVILADANLDKVLSAYNKHRDKPIREQAENIIHLFTLTNLGAPAAFKYFDTTIDRKRYTSTKEVLDATLIHQSITGLYETRIDLSQLGGD

SEQ ID NO: 68 - protein, 1069 aa, Staphylococcus aureus
MAPKKKRKVGIHGVPAAKRNYILGLDIGITSVGYGIIDYETRDVIDAGVRLFKEANVENNEGRRSKRGARRLKRRRRHRIQRVKKLLFDYNLLTDHSELSGINPYEARVKGLSQKLSEEEFSAALLHLAKRRGVHNVNEVEEDTGNELSTKEQISRNSKALEEKYVAELQLERLKKDGEVRGSINRFKTSDYVKEAKQLLKVQKAYHQLDQSFIDTYIDLLETRRTYYEGPGEGSPFGWKDIKEWYEMLMGHCTYFPEELRSVKYAYNADLYNALNDLNNLVITRDENEKLEYYEKFQIIENVFKQKKKPTLKQIAKEILVNEEDIKGYRVTSTGKPEFTNLKVYHDIKDITARKEIIENAELLDQIAKILTIYQSSEDIQEELTNLNSELTQEEIEQISNLKGYTGTHNLSLKAINLILDELWHTNDNQIAIFNRLKLVPKKVDLSQQKEIPTTLVDDFILSPVVKRSFIQSIKVINAIIKKYGLPNDIIIELAREKNSKDAQKMINEMQKRNRQTNERIEEIIRTTGKENAKYLIEKIKLHDMQEGKCLYSLEAIPLEDLLNNPFNYEVDHIIPRSVSFDNSFNNKVLVKQEENSKKGNRTPFQYLSSSDSKISYETFKKHILNLAKGKGRISKTKKEYLLEERDINRFSVQKDFINRNLVDTRYATRGLMNLLRSYFRVNNLDVKVKSINGGFTSFLRRKWKFKKERNKGYKHHAEDALIIANADFIFKEWKKLDKAKKVMENQMFEEKQAESMPEIETEQEYKEIFITPHQIKHIKDFKDYKYSHRVDKKPNRELINDTLYSTRKDDKGNTLIVNNLNGLYDKDNDKLKKLINKSPEKLLMYHHDPQTYQKLKLIMEQYGDEKNPLYKYYEETGNYLTKYSKKDNGPVIKKIKYYGNKLNAHLDITDDYPNSRNKVVKLSLKPYRFDVYLDNGVYKFVTVKNLDVIKKENYYEVNSKCYEEAKKLKKISNQAEFIASFYNNDLIKINGELYRVIGVNNDLLNRIEVNMIDITYREYLENMNDKRPPRIIKTIASKTQSIKKYSTDILGNLYEVKSKKHPQIIKKG

SEQ ID NO: 69 - protein, 1236 aa, Artificial Sequence
  Cpf1
MAPKKKRKVSKLEKFTNCYSLSKTLRFKAIPVGKTQENIDNKRLLVEDEKRAEDYKGVKKLLDRYYLSFINDVLHSIKLKNLNNYISLFRKKTRTEKENKELENLEINLRKEIAKAFKGNEGYKSLFKKDIIETILPEFLDDKDEIALVNSFNGFTTAFTGFFDNRENMFSEEAKSTSIAFRCINENLTRYISNMDIFEKVDAIFDKHEVQEIKEKILNSDYDVEDFFEGEFFNFVLTQEGIDVYNAIIGGFVTESGEKIKGLNEYINLYNQKTKQKLPKFKPLYKQVLSDRESLSFYGEGYTSDEEVLEVFRNTLNKNSEIFSSIKKLEKLFKNFDEYSSAGIFVKNGPAISTISKDIFGEWNVIRDKWNAEYDDIHLKKKAVVTEKYEDDRRKSFKKIGSFSLEQLQEYADADLSVVEKLKEIIIQKVDEIYKVYGSSEKLFDADFVLEKSLKKNDAVVAIMKDLLDSVKSFENYIKAFFGEGKETNRDESFYGDFVLAYDILLKVDHIYDAIRNYVTQKPYSKDKFKLYFQNPQFMGGWDKDKETDYRATILRYGSKYYLAIMDKKYAKCLQKIDKDDVNGNYEKINYKLLPGPNKMLPKVFFSKKWMAYYNPSEDIQKIYKNGTFKKGDMFNLNDCHKLIDFFKDSISRYPKWSNAYDFNFSETEKYKDIAGFYREVEEQGYKVSFESASKKEVDKLVEEGKLYMFQIYNKDFSDKSHGTPNLHTMYFKLLFDENNHGQIRLSGGAELFMRRASLKKEELVVHPANSPIANKNPDNPKKTTTLSYDVYKDKRFSEDQYELHIPIAINKCPKNIFKINTEVRVLLKHDDNPYVIGIDRGERNLLYIVVVDGKGNIVEQYSLNEIINNFNGIRIKTDYHSLLDKKEKERFEARQNWTSIENIKELKAGYISQVVHKICELVEKYDAVIALEDLNSGFKNSRVKVEKQVYQKFEKMLIDKLNYMVDKKSNPCATGGALKGYQITNKFESFKSMSTQNGFIFYIPAWLTSKIDPSTGFVNLLKTKYTSIADSKKFISSFDRIMYVPEEDLFEFALDYKNFSRTDADYIKKWKLYSYGNRIRIFRNPKKNNVFDWEEVCLTSAYKELFNKYGINYQQGDIRALLCEQSDKAFYSSFMALMSLMLQMRNSITGRTDVDFLISPVKNSDGIFYDSRNYEAQENAILPKNADANGAYNIARKVLWAIGQFKKAEDEKLDKVKIAISNKEWLEYAQTSVKH

SEQ ID NO: 70 - protein, 990 aa, Artificial Sequence
  Casx
MAPKKKRKVSMQEIKRINKIRRRLVKDSNTKKAGKTGPMKTLLVRVMTPDLRERLENLRKKPENIPQPISNTSRANLNKLLTDYTEMKKAILHVYWEEFQKDPVGLMSRVAQPAPKNIDQRKLIPVKDGNERLTSSGFACSQCCQPLYVYKLEQVNDKGKPHTNYFGRCNVSEHERLILLSPHKPEANDELVTYSLGKFGQRALDFYSIHVTRESNHPVKPLEQIGGNSCASGPVGKALSDACMGAVASFLTKYQDIILEHQKVIKKNEKRLANLKDIASANGLAFPKITLPPQPHTKEGIEAYNNVVAQIVIWVNLNLWQKLKIGRDEAKPLQRLKGFPSFPLVERQANEVDWWDMVCNVKKLINEKKEDGKVFWQNLAGYKRQEALLPYLSSEEDRKKGKKFARYQFGDLLLHLEKKHGEDWGKVYDEAWERIDKKVEGLSKHIKLEEERRSEDAQSKAALTDWLRAKASFVIEGLKEADKDEFCRCELKLQKWYGDLRGKPFAIEAENSILDISGFSKQYNCAFIWQKDGVKKLNLYLIINYFKGGKLRFKKIKPEAFEANRFYTVINKKSGEIVPMEVNFNFDDPNLIILPLAFGKRQGREFIWNDLLSLETGSLKLANGRVIEKTLYNRRTRQDEPALFVALTFERREVLDSSNIKPMNLIGIDRGENIPAVIALTDPEGCPLSRFKDSLGNPTHILRIGESYKEKQRTIQAAKEVEQRRAGGYSRKYASKAKNLADDMVRNTARDLLYYAVTQDAMLIFENLSRGFGRQGKRTFMAERQYTRMEDWLTAKLAYEGLPSKTYLSKTLAQYTSKTCSNCGFTITSADYDRVLEKLKKTATGWMTTINGKELKVEGQITYYNRYKRQNVVKDLSVELDRLSEESVNNDISSWTKGRSGEALSLLKKRFSHRPVQEKFVCLNCGFETHADEQAALNIARSWLFLRSQEYKKYQTNKTTGNTDKRAFVETWQSFYRKKLKEVWKPAVTS

SEQ ID NO: 71 - DNA, 1782 bp, Artificial Sequence
  hyperactive PiggyBac (PB) transposase nucleic acid
atgggcagcagcctggacgacgagcacatcctgagcgccctgctgcagagcgacgacgagctggtcggcgaggacagcgacagcgaggtgagcgaccacgtgagcgaggacgacgtgcagtccgacaccgaggaggccttcatcgacgaggtgcacgaggtgcagcctaccagcagcggctccgagatcctggacgagcagaacgtgatcgagcagcccggcagctccctggccagcaacaggatcctgaccctgccccagaggaccatcaggggcaagaacaagcactgctggtccacctccaagcccaccaggcggagcagggtgtccgccctgaacatcgtgagaagccagaggggccccaccaggatgtgcaggaacatctacgaccccctgctgtgcttcaagctgttcttcaccgacgagatcatcagcgagatcgtgaagtggaccaacgccgagatcagcctgaagaggcgggagagcatgacctccgccaccttcagggacaccaacgaggacgagatctacgccttcttcggcatcctggtgatgaccgccgtgaggaaggacaaccacatgagcaccgacgacctgttcgacagatccctgagcatggtgtacgtgagcgtgatgagcagggacagattcgacttcctgatcagatgcctgaggatggacgacaagagcatcaggcccaccctgcgggagaacgacgtgttcacccccgtgagaaagatctgggacctgttcatccaccagtgcatccagaactacacccctggcgcccacctgaccatcgacgagcagctgctgggcttcaggggcaggtgccccttcagggtctatatccccaacaagcccagcaagtacggcatcaagatcctgatgatgtgcgacagcggcaccaagtacatgatcaacggcatgccctacctgggcaggggcacccagaccaacggcgtgcccctgggcgagtactacgtgaaggagctgtccaagcccgtccacggcagctgcagaaacatcacctgcgacaactggttcaccagcatccccctggccaagaacctgctgcaggagccctacaagctgaccatcgtgggcaccgtgagaagcaacaagagagagatccccgaggtcctgaagaacagcaggtccaggcccgtgggcaccagcatgttctgcttcgacggccccctgaccctggtgtcctacaagcccaagcccgccaagatggtgtacctgctgtccagctgcgacgaggacgccagcatcaacgagagcaccggcaagccccagatggtgatgtactacaaccagaccaagggcggcgtggacaccctggaccagatgtgcagcgtgatgacctgcagcagaaagaccaacaggtggcccatggccctgctgtacggcatgatcaacatcgcctgcatcaacagcttcatcatctacagccacaacgtgagcagcaagggcgagaaggtgcagagccggaaaaagttcatgcggaacctgtacatgggcctgacctccagcttcatgaggaagaggctggaggcccccaccctgaagagatacctgagggacaacatcagcaacatcctgcccaaagaggtgcccggcaccagcgacgacagcaccgaggagcccgtgatgaagaagaggacctactgcacctactgtcccagcaagatcagaagaaaggccagcgccagctgcaagaagtgtaagaaggtcatctgccgggagcacaacatcgacatgtgccagagctgtttc

SEQ ID NO: 72 - DNA, 1020 bp, Artificial Sequence
  hyperactive Sleeping Beauty (SB100) transposase nucleic acid
atgggaaaatcaaaagaaatcagccaagacctcagaaaaagaattgtagacctccacaagtctggttcatccttgggagcaatttccaaacgcctggcggtaccacgttcatctgtacaaacaatagtacgcaagtataaacaccatgggaccacgcagccgtcataccgctcaggaaggagacgcgttctgtctcctagagatgaacgtactttggtgcgaaaagtgcaaatcaatcccagaacaacagcaaaggaccttgtgaagatgctggaggaaacaggtacaaaagtatctatatccacagtaaaacgagtcctatatcgacataacctgaaaggccactcagcaaggaagaagccactgctccaaaaccgacataagaaagccagactacggtttgcaactgcacatggggacaaagatcgtactttttggagaaatgtcctctggtctgatgaaacaaaaatagaactgtttggccataatgaccatcgttatgtttggaggaagaagggggaggcttgcaagccgaagaacaccatcccaaccgtgaagcacgggggtggcagcatcatgttgtgggggtgctttgctgcaggagggactggtgcacttcacaaaatagatggcatcatggacgccgtgcagtatgtggatatattgaagcaacatctcaagacatcagtcaggaagttaaagcttggtcgcaaatgggtcttccaacacgacaatgaccccaagcatacttccaaagttgtggcaaaatggcttaaggacaacaaagtcaaggtattggagtggccatcacaaagccctgacctcaatcctatagaaaatttgtgggcagaactgaaaaagcgtgtgcgagcaaggaggcctacaaacctgactcagttacaccagctctgtcaggaggaatgggccaaaattcacccaaattattgtgggaagcttgtggaaggctacccgaaacgtttgacccaagttaaacaatttaaaggcaatgctaccaaatac

SEQ ID NO: 73 - protein, 340 aa, Artificial Sequence
  hyperactive Sleeping Beauty (SB100) transposase amino acid
MGKSKEISQDLRKRIVDLHKSGSSLGAISKRLAVPRSSVQTIVRKYKHHGTTQPSYRSGRRRVLSPRDERTLVRKVQINPRTTAKDLVKMLEETGTKVSISTVKRVLYRHNLKGHSARKKPLLQNRHKKARLRFATAHGDKDRTFWRNVLWSDETKIELFGHNDHRYVWRKKGEACKPKNTIPTVKHGGGSIMLWGCFAAGGTGALHKIDGIMDAVQYVDILKQHLKTSVRKLKLGRKWVFQHDNDPKHTSKVVAKWLKDNKVKVLEWPSQSPDLNPIENLWAELKKRVRARRPTNLTQLHQLCQEEWAKIHPNYCGKLVEGYPKRLTQVKQFKGNATKY

SEQ ID NO: 74 - protein, 3123 aa, homo sapiens
MPGAAGVLLLLLLSGGLGGVQAQRPQQQRQSQAHQQRGLFPAVLNLASNALITTNATCGEKGPEMYCKLVEHVPGQPVRNPQCRICNQNSSNPNQRHPITNAIDGKNTWWQSPSIKNGIEYHYVTITLDLQQVFQIAYVIVKAANSPRPGNWILERSLDDVEYKPWQYHAVTDTECLTLYNIYPRTGPPSYAKDDEVICTSFYSKIHPLENGEIHISLINGRPSADDPSPELLEFTSARYIRLRFQRIRTLNADLMMFAHKDPREIDPIVTRRYYYSVKDISVGGMCICYGHARACPLDPATNKSRCECEHNTCGDSCDQCCPGFHQKPWRAGTFLTKTECEACNCHGKAEECYYDENVARRNLSLNIRGKYIGGGVCINCTQNTAGINCETCTDGFFRPKGVSPNYPRPCQPCHCDPIGSLNEVCVKDEKHARRGLAPGSCHCKTGFGGVSCDRCARGYTGYPDCKACNCSGLGSKNEDPCFGPCICKENVEGGDCSRCKSGFFNLQEDNWKGCDECFCSGVSNRCQSSYWTYGKIQDMSGWYLTDLPGRIRVAPQQDDLDSPQQISISNAEARQALPHSYYWSAPAPYLGNKLPAVGGQLTFTISYDLEEEEEDTERVLQLMIILEGNDLSISTAQDEVYLHPSEEHTNVLLLKEESFTIHGTHFPVRRKEFMTVLANLKRVLLQITYSFGMDAIFRLSSVNLESAVSYPTDGSIAAAVEVCQCPPGYTGSSCESCWPRHRRVNGTIFGGICEPCQCFGHAESCDDVTGECLNCKDHTGGPYCDKCLPGFYGEPTKGTSEDCQPCACPLNIPSNNFSPTCHLDRSLGLICDGCPVGYTGPRCERCAEGYFGQPSVPGGSCQPCQCNDNLDFSIPGSCDSLSGSCLICKPGTTGRYCELCADGYFGDAVDAKNCQPCRCNAGGSFSEVCHSQTGQCECRANVQGQRCDKCKAGTFGLQSARGCVPCNCNSFGSKSFDCEESGQCWCQPGVTGKKCDRCAHGYFNFQEGGCTACECSHLGNNCDPKTGRCICPPNTIGEKCSKCAPNTWGHSITTGCKACNCSTVGSLDFQCNVNTGQCNCHPKFSGAKCTECSRGHWNYPRCNLCDCFLPGTDATTCDSETKKCSCSDQTGQCTCKVNVEGIHCDRCRPGKFGLDAKNPLGCSSCYCFGTTTQCSEAKGLIRTWVTLKAEQTILPLVDEALQHTTTKGIVFQHPEIVAHMDLMREDLHLEPFYWKLPEQFEGKKLMAYGGKLKYAIYFEAREETGFSTYNPQVIIRGGTPTHARIIVRHMAAPLIGQLTRHEIEMTEKEWKYYGDDPRVHRTVTREDFLDILYDIHYILIKATYGNFMRQSRISEISMEVAEQGRGTTMTPPADLIEKCDCPLGYSGLSCEACLPGFYRLRSQPGGRTPGPTLGTCVPCQCNGHSSLCDPETSICQNCQHHTAGDFCERCALGYYGIVKGLPNDCQQCACPLISSSNNFSPSCVAEGLDDYRCTACPRGYEGQYCERCAPGYTGSPGNPGGSCQECECDPYGSLPVPCDPVTGFCTCRPGATGRKCDGCKHWHAREGWECVFCGDECTGLLLGDLARLEQMVMSINLTGPLPAPYKMLYGLENMTQELKHLLSPQRAPERLIQLAEGNLNTLVTEMNELLTRATKVTADGEQTGQDAERTNTRAKSLGEFIKELARDAEAVNEKAIKLNETLGTRDEAFERNLEGLQKEIDQMIKELRRKNLETQKEIAEDELVAAEALLKKVKKLFGESRGENEEMEKDLREKLADYKNKVDDAWDLLREATDKIREANRLFAVNQKNMTALEKKKEAVESGKRQIENTLKEGNDILDEANRLADEINSIIDYVEDIQTKLPPMSEELNDKIDDLSQEIKDRKLAEKVSQAESHAAQLNDSSAVLDGILDEAKNISFNATAAFKAYSNIKDYIDEAEKVAKEAKDLAHEATKLATGPRGLLKEDAKGCLQKSFRILNEAKKLANDVKENEDHLNGLKTRIENADARNGDLLRTLNDTLGKLSAIPNDTAAKLQAVKDKARQANDTAKDVLAQITELHQNLDGLKKNYNKLADSVAKTNAVVKDPSKNKIIADADATVKNLEQEADRLIDKLKPIKELEDNLKKNISEIKELINQARKQANSIKVSVSSGGDCIRTYKPEIKKGSYNNIVVNVKTAVADNLLFYLGSAKFIDFLAIEMRKGKVSFLWDVGSGVGRVEYPDLTIDDSYWYRIVASRTGRNGTISVRALDGPKASIVPSTHHSTSPPGYTILDVDANAMLFVGGLTGKLKKADAVRVITFTGCMGETYFDNKPIGLWNFREKEGDCKGCTVSPQVEDSEGTIQFDGEGYALVSRPIRWYPNISTVMFKFRTFSSSALLMYLATRDLRDFMSVELTDGHIKVSYDLGSGMASVVSNQNHNDGKWKSFTLSRIQKQANISIVDIDTNQEENIATSSSGNNFGLDLKADDKIYFGGLPTLRNLSMKARPEVNLKKYSGCLKDIEISRTPYNILSSPDYVGVTKGCSLENVYTVSFPKPGFVELSPVPIDVGTEINLSFSTKNESGIILLGSGGTPAPPRRKRRQTGQAYYVILLNRGRLEVHLSTGARTMRKIVIRPEPNLFHDGREHSVHVERTRGIFTVQVDENRRYMQNLTVEQPIEVKKLFVGGAPPEFQPSPLRNIPPFEGCIWNLVINSVPMDFARPVSFKNADIGRCAHQKLREDEDGAAPAEIVIQPEPVPTPAFPTPTPVLTHGPCAAESEPALLIGSKQFGLSRNSHIAIAFDDTKVKNRLTIELEVRTEAESGLLFYMARINHADFATVQLRNGLPYFSYDLGSGDTHTMIPTKINDGQWHKIKIMRSKQEGILYVDGASNRTISPKKADILDVVGMLYVGGLPINYTTRRIGPVTYSIDGCVRNLHMAEAPADLEQPTSSFHVGTCFANAQRGTYFDGTGFAKAVGGFKVGLDLLVEFEFRTTTTTGVLLGISSQKMDGMGIEMIDEKLMFHVDNGAGRFTAVYDAGVPGHLCDGQWHKVTANKIKHRIELTVDGNQVEAQSPNPASTSADTNDPVFVGGFPDDLKQFGLTTSIPFRGCIRSLKLTKGTGKPLEVNFAKALELRGVQPVSCPANS

SEQ ID NO: 75 - DNA, 9369 bp, homo sapiens
atgccgggagccgccggggtcctcctccttctgctgctctccggaggcctcgggggcgtacaggcgcagaggccgcagcagcagcggcagtcacaggcacatcagcaaagaggtttattccctgctgtcctgaatcttgcttctaatgctcttatcacgaccaatgcaacatgtggagaaaaaggacctgaaatgtactgcaaattggtagaacatgtccctgggcagcctgtgaggaacccgcagtgtcgaatctgcaatcaaaacagcagcaatccaaaccagagacacccgattacaaatgctattgatggaaagaacacttggtggcagagtcccagtattaagaatggaatcgaataccattatgtgacaattaccctggatttacagcaggtgttccagatcgcgtatgtgattgtgaaggcagctaactccccccggcctggaaactggattttggaacgctctcttgatgatgttgaatacaagccctggcagtatcatgctgtgacagacacggagtgcctaacgctttacaatatttatccccgcactgggccaccgtcatatgccaaagatgatgaggtcatctgcacttcattttactccaagatacaccccttagaaaatggagagattcacatctctttaatcaatgggagaccaagtgccgatgatccttctccagaactgctagaatttacctccgctcgctatattcgcctgagatttcagaggatccgcacactgaatgctgacttgatgatgtttgctcacaaagacccaagagaaattgaccccattgtcaccagaagatattactactcggtcaaggatatttcagttggagggatgtgcatctgctatggtcatgccagggcttgtccacttgatccagcgacaaataaatctcgctgtgagtgtgagcataacacatgtggcgatagctgtgatcagtgctgtccaggattccatcagaaaccctggagagctggaacttttctaactaaaactgaatgtgaagcatgcaattgtcatggaaaagctgaagaatgctattatgatgaaaatgttgccagaagaaatctgagtttgaatatacgtggaaagtacattggagggggtgtctgcattaattgtacccaaaacactgctggtataaactgcgagacatgtactgatggcttcttcagacccaaaggggtatctccaaattatccaaggccatgccagccatgtcattgcgatccaattggttccttaaatgaagtctgtgtcaaggatgagaaacatgctcgacgaggtttggcacctggatcctgtcattgcaaaactggttttggaggtgtgagctgtgatcggtgtgccaggggctacactggctacccggactgcaaagcctgtaactgcagtgggttagggagcaaaaatgaggatccttgttttggcccctgtatctgcaaggaaaatgttgaaggaggagactgtagtcgttgcaaatccggcttcttcaatttgcaagaggataattggaaaggctgcgatgagtgtttctgttcaggggtttcaaacagatgtcagagttcctactggacctatggcaaaatacaagatatgagtggctggtatctgactgaccttcctggccgcattcgagtggctccccagcaggacgacttggactcacctcagcagatcagcatcagtaacgcggaggcccggcaagccctgccgcacagctactactggagcgcgccggctccctatctgggaaacaaactcccagcagtaggaggacagttgacatttaccatatcatatgaccttgaagaagaggaagaagatacagaacgtgttctccagcttatgattatcttagagggtaatgacttgagcatcagcacagcccaagatgaggtgtacctgcacccatctgaagaacatactaatgtattgttacttaaagaagaatcatttaccatacatggcacacattttccagtccgtagaaaggaatttatgacagtgcttgcgaatttgaagagagtcctcctacaaatcacatacagctttgggatggatgccatcttcaggttgagctctgttaaccttgaatccgctgtctcctatcctactgatggaagcattgcagcagctgtagaagtgtgtcagtgcccaccagggtatactggctcctcttgtgaatcttgttggcctaggcacaggcgagttaacggcactatttttggtggcatctgtgagccatgtcagtgctttggtcatgcggagtcctgtgatgacgtcactggagaatgcctgaactgtaaggatcacacaggtggcccatattgtgataaatgtcttcctggtttctatggcgagcctactaaaggaacctctgaagactgtcaaccctgtgcctgtccactcaatatcccatccaataactttagcccaacgtgccatttagaccggagtcttggattgatctgtgatggatgccctgtcgggtacacaggaccacgctgtgagaggtgtgcagaaggctattttggacaaccctctgtacctggaggatcatgtcagccatgccaatgcaatgacaaccttgacttctccatccctggcagctgtgacagcttgtctggctcctgtctgatatgtaaaccaggtacaacaggccggtactgtgagctctgtgctgatggatattttggagatgcagttgatgcgaagaactgtcagccctgtcgctgtaatgccggtggctctttctctgaggtttgccacagtcaaactggacagtgtgagtgcagagccaacgttcagggtcagagatgtgacaaatgcaaggctgggacctttggcctacaatcagcaaggggctgtgttccctgcaactgcaattcttttgggtctaagtcattcgactgtgaagagagtggacaatgttggtgccaacctggagtcacagggaagaaatgtgaccgctgtgcccacggctatttcaacttccaagaaggaggctgcacagcttgtgaatgttctcatctgggtaataattgtgacccaaagactgggcgatgcatttgccctcccaataccattggagagaaatgttctaaatgtgcacccaatacctggggccacagcattaccactggttgtaaggcttgtaactgcagcacagtgggatccttggatttccaatgcaatgtaaatacaggccaatgcaactgtcatccaaaattctctggtgcaaaatgtacagagtgcagtcgaggtcactggaactaccctcgctgcaatctctgtgactgcttcctccctgggacagatgccacaacctgtgattcagagactaaaaaatgctcctgtagtgatcaaactgggcagtgcacttgtaaggtgaatgtggaaggcatccactgtgacagatgccggcctggcaaattcggactcgatgccaagaatccacttggctgcagcagctgctattgcttcggcactactacccagtgctctgaagcaaaaggactgatccggacgtgggtgactctgaaggctgagcagaccattctacccctggtagatgaggctctgcagcacacgaccaccaagggcattgtttttcaacatccagagattgttgcccacatggacctgatgagagaagatctccatttggaacctttttattggaaacttccagaacaatttgaaggaaagaagttgatggcctatgggggcaaactcaagtatgcaatctatttcgaggctcgggaagaaacaggtttctctacatataatcctcaagtgatcattcgaggtgggacacctactcatgctagaattatcgtcaggcatatggctgctcctctgattggccaattgacaaggcatgaaattgaaatgacagagaaagaatggaaatattatggggatgatcctcgagtccatagaactgtgacccgagaagacttcttggatatactatatgatattcattacattcttatcaaagctacttatggaaatttcatgcgacaaagcaggatttctgaaatctcaatggaggtagctgaacaaggacgtggaacaacaatgactcctccagctgacttgattgaaaaatgtgattgtcccctgggctattctggcctgtcctgtgaggcatgcttgccgggattttatcgactgcgttctcaaccaggtggccgcacccctggaccaaccctgggcacctgtgttccatgtcaatgtaatggacacagcagcctgtgtgaccctgaaacatcgatatgccagaattgtcaacatcacactgctggtgacttctgtgaacgatgtgctcttggatactatggaattgtcaagggattgccaaatgactgtcagcaatgtgcctgccctctgatttcttccagtaacaatttcagcccctcttgtgtcgcagaaggacttgacgactaccgctgcacggcttgtccacggggatatgaaggccagtactgtgaaaggtgtgcccctggctatactggcagtccaggcaaccctggaggctcctgccaagaatgtgagtgtgatccctatggctcactgcctgtgccctgtgaccctgtcacaggattctgcacgtgccgacctggagccacgggaaggaagtgtgacggctgcaagcactggcatgcacgcgagggctgggagtgtgttttttgtggagatgagtgcactggccttcttctcggtgacttggctcgcctggagcagatggtcatgagcatcaacctcactggtccgctgcctgcgccatataaaatgctgtatggtcttgaaaatatgactcaggagctaaagcacttgctgtcacctcagcgggccccagagaggcttattcagctggcagagggcaatctgaatacactcgtgaccgaaatgaacgagctgctgaccagggctaccaaagtgacagcagatggcgagcagaccggacaggatgctgagaggaccaacacaagagcaaagtccctgggagaattcattaaggagcttgcccgggatgcagaagctgtaaatgaaaaagctataaaactaaatgaaactctaggaactcgagatgaggcctttgagagaaatttggaagggcttcagaaagagattgaccagatgattaaagaactgaggaggaaaaatctagagacacaaaaggaaattgctgaagatgagttggtagctgcagaagcccttctgaaaaaagtgaagaagctgtttggagagtcccggggggaaaatgaagaaatggagaaggatctccgggaaaaactggctgactacaaaaacaaagttgatgatgcttgggaccttttgagagaagccacagataaaatcagagaagctaatcgcctatttgcagtaaatcagaaaaacatgactgcattggagaaaaagaaggaggctgttgaaagcggcaaacgacaaattgagaacactttaaaagagggcaatgacatactcgatgaagccaaccgtcttgcagatgaaatcaactccatcatagactatgttgaagacatccaaactaaattgccacctatgtctgaggagcttaatgataaaatagatgacctctcccaagaaataaaggacaggaaacttgctgagaaggtgtcccaggctgagagccacgcagctcagttgaatgactcatctgctgtccttgatggaatccttgatgaggctaaaaacatctccttcaatgccactgcagccttcaaagcctacagcaatattaaggactatattgatgaagctgagaaagttgccaaagaagccaaagatcttgcacatgaagctacaaaactggcaacaggtcctcggggtttattaaaggaagatgccaaaggctgtcttcagaaaagtttcaggattcttaacgaagccaagaagttagcaaatgatgtaaaagaaaatgaagaccatctaaatggcttaaaaaccaggatagaaaatgctgatgctagaaatggggatctcttgagaactttgaatgacactttgggaaagttatcagctattccaaatgatacagctgctaaactgcaagctgttaaggacaaagccagacaagccaacgacacagctaaagatgtactggcacagattacagagctccaccagaacctcgatggcctgaagaagaattacaataaactagcagacagcgtcgccaaaacgaatgctgtggttaaagatccttccaagaacaaaatcattgccgatgcagatgccactgtcaaaaatttagaacaggaagctgaccggctaatagataaactcaaacccatcaaggaacttgaggataacctaaagaaaaacatctctgagataaaggaattgataaaccaagctcggaaacaagccaattctatcaaagtatctgtgtcttcaggaggtgactgcattcgaacatacaaaccagaaatcaagaaaggaagttacaataatattgttgtcaacgtaaagacagctgttgctgataacctcctcttttatcttggaagtgccaaatttattgactttctggctatagaaatgcgtaaaggcaaagtcagcttcctctgggatgttggatctggagttggacgtgtagagtacccagatttgactattgatgactcatattggtaccgtatcgtagcatcaagaactgggagaaatggaactatttctgtgagagccctggatggacccaaagccagcattgtgcccagcacacaccattcgacgtcccctccagggtacacgattctagatgtggatgcaaatgcaatgctgtttgttggtggcctgactgggaaattaaagaaggctgatgctgtacgtgtgattacattcactggctgcatgggagaaacatactttgacaacaaacctataggtttgtggaatttccgagaaaaagaaggtgactgcaaaggatgcactgtcagtcctcaggtggaagatagtgaggggactattcaatttgatggagaaggttatgcattggtcagccgtcccattcgctggtaccccaacatctccactgtcatgttcaagttcagaacattttcttcgagtgcccttctgatgtatcttgccacacgagacctgagagatttcatgagtgtggagctcactgatgggcacataaaagtcagttacgatctgggctcaggaatggcttccgttgtcagcaatcaaaaccataatgatgggaaatggaaatcattcactctgtcaagaattcaaaaacaagccaatatatcaattgtagatatagatactaatcaggaggagaatatagcaacttcgtcttctggaaacaactttggtcttgacttgaaagcagatgacaaaatatattttggtggcctgccaacgctgagaaacttgagtatgaaagcaaggccagaagtaaatctgaagaaatattccggctgcctcaaagatattgaaatttcaagaactccgtacaatatactcagtagtcccgattatgttggtgttaccaaaggatgttccctggagaatgtttacacagttagctttcctaagcctggttttgtggagctctcccctgtgccaattgatgtaggaacagaaatcaacctgtcattcagcaccaagaatgagtccggcatcattcttttgggaagtggagggacaccagcaccacctaggagaaaacgaaggcagactggacaggcctattatgtaatactcctcaacaggggccgtctggaagtgcatctctccacaggggcacgaacaatgaggaaaattgtgatcagaccagagccgaatctgtttcatgatggaagagaacattccgttcatgtagagcgaactagaggcatctttacagttcaagtggatgaaaacagaagatacatgcaaaacctgacagttgaacagcctatcgaagttaaaaaacttttcgttgggggtgctccacctgaatttcaaccttccccactcagaaatattcctccttttgaaggctgcatatggaatcttgttattaactctgtccccatggactttgcaaggcctgtgtccttcaaaaatgctgacattggtcgctgtgcccatcagaaactccgtgaagatgaagatggagcagctccagctgaaatagttatccagcctgagccagttcccaccccagcctttcctacgcccaccccagttctgacacatggtccttgtgctgcagaatcagaaccagctcttttgatagggagcaagcagttcgggctttcaagaaacagtcacattgcaattgcatttgatgacaccaaagttaaaaaccgcctcacaattgagttggaagtaagaaccgaagctgaatccggcttgcttttttacatggctcgcatcaatcatgctgattttgcaacagttcagctgagaaatggattgccctacttcagctatgacttggggagtggggacacccacaccatgatccccaccaaaatcaatgatggccagtggcacaagattaagataatgagaagtaagcaagaaggaattctttatgtagatggggcttccaacagaaccatcagtcccaaaaaagccgacatcctggatgtcgtgggaatgctgtatgttggtgggttacccatcaactacactacccgaagaattggtccagtgacctatagcattgatggctgcgtcaggaatctccacatggcagaggcccctgccgatctggaacaacccacctccagcttccatgttgggacatgttttgcaaatgctcagaggggaacatattttgacggaaccggttttgccaaagcagttggtggattcaaagtgggattggaccttcttgtagaatttgaattccgcacaactacaacgactggagttcttctggggatcagtagtcaaaaaatggatggaatgggtattgaaatgattgatgaaaagttgatgtttcatgtggacaatggtgcgggcagattcactgctgtctatgatgctggggttccagggcatttgtgtgatggacaatggcataaagtcactgccaacaagatcaaacaccgcattgagctcacagtcgatgggaaccaggtggaagcccaaagcccaaacccagcatctacatcagctgacacaaatgaccctgtgtttgttggaggcttcccagatgacctcaagcagtttggcctaacaaccagtattccgttccgaggttgcatcagatccctgaagctcaccaaaggcacaggcaagccactggaggttaattttgccaaggccctggaactgaggggcgttcaacctgtatcatgcccagccaactca

SEQ ID NO: 76 - DNA, 508 bp, Artificial sequence
  CMV promoter
cgttacataacttacggtaaatggcccgcctggctgaccgcccaacgacccccgcccattgacgtcaataatgacgtatgttcccatagtaacgccaatagggactttccattgacgtcaatgggtggagtatttacggtaaactgcccacttggcagtacatcaagtgtatcatatgccaagtacgccccctattgacgtcaatgacggtaaatggcccgcctggcattatgcccagtacatgaccttatgggactttcctacttggcagtacatctacgtattagtcatcgctattaccatggtgatgcggttttggcagtacatcaatgggcgtggatagcggtttgactcacggggatttccaagtctccaccccattgacgtcaatgggagtttgttttggcaccaaaatcaacgggactttccaaaatgtcgtaacaactccgccccattgacgcaaatgggcggtaggcgtgtacggtgggaggtctatataagcagagct

SEQ ID NO: 77 - DNA, 1651 bp, Artificial sequence
  CAG promoter
acataacttacggtaaatggcccgcctggctgaccgcccaacgacccccgcccattgacgtcaataatgacgtatgttcccatagtaacgccaatagggactttccattgacgtcaatgggtggagtatttacggtaaactgcccacttggcagtacatcaagtgtatcatatgccaagtacgccccctattgacgtcaatgacggtaaatggcccgcctggcattatgcccagtacatgaccttatgggactttcctacttggcagtacatctacgtattagtcatcgctattaccatggtcgaggtgagccccacgttctgcttcactctccccatctcccccccctccccacccccaattttgtatttatttattttttaattattttgtgcagcgatgggggcggggggggggggggggcgcgcgccaggcggggcggggcggggcgaggggcggggcggggcgaggcggagaggtgcggcggcagccaatcagagcggcgcgctccgaaagtttccttttatggcgaggcggcggcggcggcggccctataaaaagcgaagcgcgcggcgggcggggagtcgctgcgacgctgccttcgccccgtgccccgctccgccgccgcctcgcgccgcccgccccggctctgactgaccgcgttactcccacaggtgagcgggcgggacggcccttctcctccgggctgtaattagcgcttggtttaatgacggcttgtttcttttctgtggctgcgtgaaagccttgaggggctccgggagggccctttgtgcggggggagcggctcggggggtgcgtgcgtgtgtgtgtgcgtggggagcgccgcgtgcggctccgcgctgcccggcggctgtgagcgctgcgggcgcggcgcggggctttgtgcgctccgcagtgtgcgcgaggggagcgcggccgggggcggtgccccgcggtgcggggggggctgcgaggggaacaaaggctgcgtgcggggtgtgtgcgtgggggggtgagcagggggtgtgggcgcgtcggtcgggctgcaaccccccctgcacccccctccccgagttgctgagcacggcccggcttcgggtgcggggctccgtacggggcgtggcgcggggctcgccgtgccgggcggggggtggcggcaggtgggggtgccgggcggggcggggccgcctcgggccggggagggctcgggggaggggcgcggcggcccccggagcgccggcggctgtcgaggcgcggcgagccgcagccattgccttttatggtaatcgtgcgagagggcgcagggacttcctttgtcccaaatctgtgcggagccgaaatctgggaggcgccgccgcaccccctctagcgggcgcggggcgaagcggtgcggcgccggcaggaaggaaatgggcggggagggccttcgtgcgtcgccgcgccgccgtccccttctccctctccagcctcggggctgtccgcggggggacggctgccttcgggggggacggggcagggcggggttcggcttctggcgtgtgaccggcggctctagagcctctgctaaccatgttcatgccttcttctttttcctacagctcctgggcaacgtgctggttattgtgctgtctcatcattttggcaaagaatt

SEQ ID NO: 78 - DNA, 546 bp, Artificial sequence
  EF1-alpha Promoter
aaggatctgcgatcgctccggtgcccgtcagtgggcagagcgcacatcgcccacagtccccgagaagttggggggaggggtcggcaattgaacgggtgcctagagaaggtggcgcggggtaaactgggaaagtgatgtcgtgtactggctccgcctttttcccgagggtgggggagaaccgtatataagtgcagtagtcgccgtgaacgttctttttcgcaacgggtttgccgccagaacacagctgaagcttcgaggggctcgcatctctccttcacgcgcccgccgccctacctgaggccgccatccacgccggttgagtcgcgttctgccgcctcccgcctgtggtgcctcctgaactgcgtccgccgtctaggtaagtttaaagctcaggtcgagaccgggcctttgtccggcgctcccttggagcctacctagactcagccggctctccacgctttgcctgaccctgcttgctcaactctacgtctttgtttcgttttctgttctgcgccgttacagatccaagctgtgaccggcgcctac

SEQ ID NO: 79 - DNA, 317 bp, Artificial sequence
  SV-40 Promoter
ggtgtggaaagtccccaggctccccagcaggcagaagtatgcaaagcatgcatctcaattagtcagcaaccaggtgtggaaagtccccaggctccccagcaggcagaagtatgcaaagcatgcatctcaattagtcagcaaccatagtcccgcccctaactccgcccatcccgcccctaactccgcccagttccgcccattctccgccccatggctgactaattttttttatttatgcagaggccgaggccgcctcggcctctgagctattccagaagtagtgaggaggcttttttggaggcctaggcttttgcaaa

SEQ ID NO: 80 - DNA, 725 bp, Artificial sequence
  EalbAATp
gacgcgcatgctcctctagactcgacgcgtgttcctagattacactacacattctgcaagcatagcacagagcaatgttctactttaattactttcattttcttgtatcctcacagcctagaaaataacctgcgttacagcatccactcagtatcccttgagcatgaggtgacactacttaacatagggacgagatggtactttgtgtctcctgctctgtcagcagggcacagtacttgctgataccagggaatgtttgttcttaaataccatcattccggacgtgtttgccttggccagttttccatgtacatgcagaaagaagtttggactgatcaatacagtcctctgcctttaaagcaataggaaaaggccaacttgtctacgtttagtatgtggctgtagatctgtacccgccaccccctccaccttggacacaggacgctgtggtttctgagccaggtacaatgactcctttcggtaagtgcagtggaagctgtacactgcccaggcaaagcgtccgggcagcgtaggcgggcgactcagatcccagccagtggacttagcccctgtttgctcctccgataactggggtgaccttggttaatattcaccagcagcctcccccgttgcccctctggatccactgcttaaatacggacgaggacagggccctgtctcctcagcttcaggcaccaccactgacctgggacagtgaagcggcc

SEQ ID NO: 81 - DNA, 51 bp, Artificial sequence
  Splice Acceptor
gataggcacctattggtcttactgacatccactttgcctttctctccacag

SEQ ID NO: 82 - DNA, 86 bp, artificial sequence
  synthetic ama2 intron 26
gtaagttagtcattgtttggtgcaaagataccaatcaatggttttgcattcagttttgtcatagtgatttctcttcttgttttcag

SEQ ID NO: 83 - DNA, 131 bp, artificial sequence
  SV40-PolyA
aacttgtttattgcagcttataatggttacaaataaagcaatagcatcacaaatttcacaaataaagcatttttttcactgcattctagttgtggtttgtccaaactcatcaatgtatcttatcatgtctg

SEQ ID NO: 84 - DNA, 263 bp, artificial sequence
  BHG-PolyA
gtgtcacctaaatgctagagctcgctgatcagcctcgactgtgccttctagttgccagccatctgttgtttgcccctcccccgtgccttccttgaccctggaaggtgccactcccactgtcctttcctaataaaatgaggaaattgcatcgcattgtctgagtaggtgtcattctattctggggggtggggtggggcaggacagcaagggggaggattgggaagacaatagcaggcatgctggggatgcggtgggctctatgg

SEQ ID NO: 85 - DNA, 49 bp, artificial sequence
  HSV-Tk-PolyA
cggcaataaaaagacagaataaaacgcacgggtgttgggtcgtttgttc

SEQ ID NO: 86 - DNA, 232 bp, artificial sequence
  Insulator a
gagggacagcccccccccaaagcccccagggatgtaattacgtccctcccccgctagggggcagcagcgagccgcccggggctccgctccggtccggcgctccccccgcatccccgagccggcagcgtgcggggacagcccgggcacggggaaggtggcacgggatcgctttcctctgaacgcttctcgctgctctttgagcctgcagacacctggggggatacggggaaaa

SEQ ID NO: 87 - DNA, 231 bp, artificial sequence
  insulator b
ttttccccgtatccccccaggtgtctgcaggctcaaagagcagcgagaagcgttcagaggaaagcgatcccgtgccaccttccccgtgcccgggctgtccccgcacgctgccggctcggggatgcggggggagcgccggaccggagcggagccccgggcggctcgctgctgccccctagcgggggagggacgtaattacatccctgggggctttgggggggggctgtccct

SEQ ID NO: 88 - DNA, 63 bp, artificial sequence
  ITR-5'
ccctagaaagataatcatattgtgacgtacgttaaagataatcatgcgtaaaattgacgcatg

SEQ ID NO: 89 - DNA, 35 bp, artificial sequence
  ITR-3'
catgcgtcaattttacgcagactatctttctaggg

SEQ ID NO: 90 - DNA, 20 bp, artificial sequence
  gRNA-Rosa26-1
agtctttctagaagatgggc

SEQ ID NO: 91 - DNA, 20 bp, artificial sequence
  gRNA-Rosa26-2
cagtctttctagaagatggg

SEQ ID NO: 92 - DNA, 20 bp, artificial sequence
  gRNA-Albumin-1
caatctttaaatatgttgtg

SEQ ID NO: 93 - DNA, 20 bp, artificial sequence
  gRNA-Rosa26-4
actccagtctttctagaaga

SEQ ID NO: 94 - DNA, 20 bp, artificial sequence
  gRNA-Albumin-1
caatctttaaatatgttgtg

SEQ ID NO: 95 - DNA, 20 bp, artificial sequence
  gRNA-Albumin-2
gttacaggaaaatctgaagg

SEQ ID NO: 96 - DNA, 20 bp, artificial sequence
  gRNA-Albumin-3
taactttgagtgtagcagag

SEQ ID NO: 97 - DNA, 20 bp, artificial sequence
  gRNA-Albumin-4
tatagcatggtcgagcaggc

SEQ ID NO: 98 - protein, 3117 aa, mus musculus
MPAATAGILLLLLLGTLEGSQTQRRQSQAHQQRGLFPAVLNLASNALITTNATCGEKGPEMYCKLVEHVPGQPVRNPQCRICNQNSSNPYQRHPITNAIDGKNTWWQSPSIKNGVEYHYVTITLDLQQVFQIAYVIVKAANSPRPGNWILERSLDDVEYKPWQYHAVTDTECLTLYNIYPRTGPPSYAKDDEVICTSFYSKIHPLENGEIHISLINGRPSADDPSPELLEFTSARYIRLRFQRIRTLNADLMMFAHKDPREIDPIVTRRYYYSVKDISVGGMCICYGHARACPLDPATNKSRCECEHNTCGESCDRCCPGFHQKPWRAGTFLTKSECEACNCHGKAEECYYDETVASRNLSLNIHGKYIGGGVCINCTHNTAGINCETCVDGFFRPKGVSPNYPRPCQPCHCDPTGSLSEVCVKDEKYAQRGLKPGSCHCKTGFGGVNCDRCVRGYHGYPDCQPCNCSGLGSTNEDPCVGPCSCKENVEGEDCSRCKSGFFNLQEDNQKGCEECFCSGVSNRCQSSYWTYGNIQDMRGWYLTDLSGRIRMAPQLDNPDSPQQISISNSEARKSLLDGYYWSAPPPYLGNRLPAVGGQLSFTISYDLEEEEDDTEKILQLMIIFEGNDLRISTAYKEVYLEPSEEHIEEVSLKEEAFTIHGTNLPVTRKDFMIVLTNLERVLMQITYNLGMDAIFRLSSVNLESAVPYPTDRRIATDVEVCQCPPGYSGSSCETCWPRHRRVNGTIFGGICEPCQCFAHAEACDDITGECLNCKDHTGGPYCNECLPGFYGDPTRGSPEDCQPCACPLNIPSNNFSPTCHLDRSLGLICDECPIGYTGPRCERCAEGYFGQPSIPGGSCQPCQCNDNLDYSIPGSCDSLSGSCLICKPGTTGRYCELCADGYFGDAVNAKNCQPCRCNINGSFSEICHTRTGQCECRPNVQGRHCDECKPETFGLQLGRGCLPCNCNSFGSKSFDCEASGQCWCQPGVAGKKCDRCAHGYFNFQEGGCIACDCSHLGNNCDPKTGQCICPPNTTGEKCSECLPNTWGHSIVTGCKVCNCSTVGSLASQCNVNTGQCSCHPKFSGMKCSECSRGHWNYPLCTLCDCFLPGTDATTCDLETRKCSCSDQTGQCSCKVNVEGVHCDRCRPGKFGLDAKNPLGCSSCYCFGVTSQCSEAKGLIRTWVTLSDEQTILPLVDEALQHTTTKGIAFQKPEIVAKMDEVRQELHLEPFYWKLPQQFEGKKLMAYGGKLKYAIYFEARDETGFATYKPQVIIRGGTPTHARIITRHMAAPLIGQLTRHEIEMTEKEWKYYGDDPRISRTVTREDFLDILYDIHYILIKATYGNVVRQSRISEISMEVAEPGHVLAGSPPAHLIERCDCPPGYSGLSCETCAPGFYRLRSEPGGRTPGPTLGTCVPCQCNGHSSQCDPETSVCQNCQHHTAGDFCERCALGYYGIVRGLPNDCQPCACPLISPSNNFSPSCVLEGLEDYRCTACPRGYEGQYCERCAPGYTGSPSSPGGSCQECECDPYGSLPVPCDRVTGLCTCRPGATGRKCDGCEHWHAREGAECVFCGDECTGLLLGDLARLEQMTMNINLTGPLPAPYKILYGLENTTQELKHLLSPQRAPERLIQLAEGNVNTLVMETNELLTRATKVTADGEQTGQDAERTNSRAESLEEFIKGLVQDAEAINEKAVQLNETLGNQDKTAERNLEELQKEIDRMLKELRSKDLQTQKEVAEDELVAAEGLLKRVNKLFGEPRAQNEDMEKDLQQKLAEYKNKLDDAWDLLREATDKTRDANRLSAANQKNMTILETKKEAIEGSKRQIENTLKEGNDILDEANRLLGEINSVIDYVDDIKTKLPPMSEELSDKIDDLAQEIKDRRLAEKVFQAESHAAQLNDSSAVLDGILDEAKNISFNATAAFRAYSNIKDYIDEAEKVAREAKELAQGATKLATSPQGLLKEDAKGSLQKSFRILNEAKKLANDVKGNHNDLNDLKTRLETADLRNSGLLGALNDTMDKLSAITNDTAAKLQAVKEKAREANDTAKAVLAQVKDLHQNLDGLKQNYNKLADSVAKTNAVVKDPSKNKIIADAGTSVRNLEQEADRLIDKLKPIKELEDNLKKNISEIKELINQARKQANSIKVSVSSGGDCVRTYRPEIKKGSYNNIVVHVKTAVADNLLFYLGSAKFIDFLAIEMRKGKVSFLWDVGSGVGRVEYPDLTIDDSYWYRIEASRTGRNGSISVRALDGPKASMVPSTYHSVSPPGYTILDVDANAMLFVGGLTGKIKKADAVRVITFTGCMGETYFDNKPIGLWNFREKEGDCKGCTVSPQVEDSEGTIQFDGEGYALVSRPIRWYPNISTVMFKFRTFSSSALLMYLATRDLKDFMSVELSDGHVKVSYDLGSGMTSVVSNQNHNDGKWKAFTLSRIQKQANISIVDIDSNQEENVATSSSGNNFGLDLKADDKIYFGGLPTLRNLSMKARPEVNVKKYSGCLKDIEISRTPYNILSSPDYVGVTKGCSLENVYTVSFPKPGFVELAAVSIDVGTEINLSFSTRNESGIILLGSGGTLTPPRRKRRQTTQAYYAIFLNKGRLEVHLSSGTRTMRKIVIKPEPNLFHDGREHSVHVERTRGIFTVQIDEDRRHMQNLTEEQPIEVKKLFVGGAPPEFQPSPLRNIPAFQGCVWNLVINSIPMDFAQPIAFKNADIGRCTYQKPREDESEAVPAEVIVQPQPVPTPAFPFPAPTMVHGPCVAESEPALLTGSKQFGLSRNSHIAIAFDDTKVKNRLTIELEVRTEAESGLLFYMARINHADFATVQLRNGFPYFSYDLGSGDTSTMIPTKINDGQWHKIKIVRVKQEGILYVDDASSQTISPKKADILDVVGILYVGGLPINYTTRRIGPVTYSLDGCVRNLHMEQAPVDLDQPTSSFHVGTCFANAESGTYFDGTGFAKAVGGFKVGLDLLVEFEFRTTRPTGVLLGVSSQKMDGMGIEMIDEKLMFHVDNGAGRFTAIYDAGIPGHMCNGQWHKVTAKKIKNRLELVVDGNQVDAQSPNSASTSADTNDPVFVGGFPGGLNQFGLTTNIRFRGCIRSLKLTKGTGKPLEVNFAKALELRGVQPVSCPT

SEQ ID NO: 99 - DNA, 9353 bp, mus musculus
atgcctgcggccaccgccgggatcctcttgctcctgctcttggggacgctcgaaggctcccagactcagcggcgacagtcccaagcgcatcaacagagaggtttatttcctgctgtcctgaatcttgcttcgaatgcactcatcacaaccaatgctacatgtggggaaaaaggacccgagatgtactgcaagttggtggaacatgtccccgggcagcctgtgaggaaccctcagtgccgaatctgcaatcagaacagcagcaatccataccagaggcacccgattacgaatgctattgatggcaagaacacatggtggcagagtcccagtatcaagaatggagtggaataccattatgtgacaattactctggatttacagcaggtgttccagattgcctacgtaattgtgaaggcagccaattcccctcggcctggaaactggattttggaacgttccctggatgacgtggagtacaaaccctggcagtatcatgcggtgacagacacggagtgcctgaccctctacaatatctatccccgcactggaccaccatcctacgccaaagatgatgaggtcatctgcacttcattttattcgaagatccaccctttagaaaatggagagattcacatttctttgatcaatgggagaccaagtgctgatgacccctcccctgaactcctggaattcacctctgctcgctacattcgcctgagatttcagaggatccgcaccttgaatgcagacttgatgatgtttgctcacaaagaccccagagaaatcgatcccattgtcacacgaagatattactattctgtcaaggatatttcagttggcgggatgtgcatctgttatggtcatgcccgggcttgtccacttgaccctgcaacaaataaatcacgctgtgagtgtgaacataacacctgtggggaaagctgtgacaggtgctgtccaggattccatcagaagccttggagagctggaaccttcctcaccaagtctgagtgtgaagcatgcaattgtcacggaaaagctgaggaatgctattatgatgaaactgttgctagcagaaatctaagtttaaatatacatgggaagtacatcggagggggtgtgtgcatcaactgcacacataacacggctgggataaattgtgagacatgtgttgatggattcttcagaccaaaaggggtatcaccaaattatccaagaccatgccagccatgtcactgtgatccaactggctcccttagtgaagtctgtgtcaaagatgagaaatatgcccagcgagggttgaaacctggatcctgtcactgcaaaactggctttggaggcgtgaactgtgatcgctgtgtcaggggttaccatggttacccagactgccaaccctgtaactgtagtggcttggggagcacaaacgaggacccttgcgttgggccctgtagctgtaaggagaatgttgaaggtgaagactgtagtcgttgcaaatctggtttcttcaacttgcaagaagataatcagaaaggctgtgaggagtgtttctgttcaggagtatcaaacagatgtcagagttcctactggacctatgggaatattcaagacatgcgtggttggtatctcacagacctctctggccgcattcggatggctccccagcttgataaccctgactcacctcagcagatcagcatcagtaactctgaggcccggaaatccctgcttgatggttactactggagtgcaccgcctccatatctgggaaacagacttccagctgttggaggacagttgtcatttaccatctcatatgacctcgaagaagaggaagacgatacagaaaaaatccttcagctgatgattatctttgagggaaatgacttaagaatcagcacagcgtataaggaggtgtacttagagccatctgaagaacacattgaggaggtgtcactcaaagaagaggcctttactatacatggaacaaatttgccagtcactagaaaagatttcatgattgttctcacaaatttggagagagtccttatgcaaatcacatacaacttagggatggacgccatcttcaggctgagttctgtcaatcttgaatctgctgtcccttatcctactgatagacgtattgcaactgatgtggaagtttgccagtgtccacctgggtacagtggcagctcttgtgaaacatgttggcctaggcaccgaagagttaacggcaccatttttggtggcatttgtgaaccatgtcagtgctttgctcatgcagaagcctgtgatgacatcacaggagaatgtctgaactgtaaggatcacacaggtgggccgtactgcaatgaatgtctccctggtttctatggtgatcctactcgaggaagccctgaagactgtcagccctgtgcctgtccactcaatatcccatcaaataactttagtccaacatgccatttagaccggagtctgggattgatctgtgacgagtgtcctattgggtacacaggaccgcgctgtgagaggtgtgcagaaggctattttggacaaccttccatacctggaggatcatgtcagccatgccaatgcaatgacaaccttgactactccatccctggcagctgtgacagcctgtctggctcctgtctgatttgtaagccaggtacaacaggccggtactgtgagctctgtgctgatgggtattttggagacgcggttaatgcaaagaactgtcaaccatgccgttgtaatatcaatggctccttctcagagatttgtcacactagaactgggcaatgtgagtgcagacccaatgtgcaggggcggcactgtgacgagtgtaagcctgaaacctttggcctgcaactgggaaggggttgtctgccctgcaactgcaattcttttgggtctaagtcctttgactgtgaagcaagtgggcagtgctggtgccagcctggagtagcagggaagaaatgtgaccgttgtgcccatggctacttcaacttccaagaaggaggctgcatagcttgtgactgttctcatctgggcaacaactgtgacccaaaaactggccaatgcatttgcccacccaataccactggagaaaagtgttctgagtgtcttcccaacacctggggtcacagcattgtcaccggctgtaaggtttgtaactgcagcactgtggggtccttggcttctcagtgcaatgtaaacacgggccagtgcagctgtcatccaaaattctctggtatgaaatgctcagagtgcagccgaggtcactggaactatcctctctgcactctatgtgactgcttccttccagggacagatgccacgacttgtgatctggagactaggaaatgctcctgtagtgatcaaactggacagtgcagctgtaaggtgaatgtggaaggcgtccactgtgacaggtgccggcctggcaaatttggactagatgccaagaacccacttggctgcagcagctgctactgctttggagttactagtcaatgctctgaagcaaaggggctgatccgtacgtgggtgactttgagtgatgaacagaccattctacctctggtggatgaggccctgcagcacacgactaccaaaggcattgctttccagaaaccagagattgttgcaaagatggatgaagtcaggcaagagctccatttggaacctttttactggaaactcccacaacaatttgaagggaaaaagttgatggcttatggtggcaaactcaagtatgccatctattttgaggctcgggatgagacaggctttgccacatataaacctcaagttatcattcgaggtggaactcctactcatgctagaattattaccagacacatggctgcccctctcattggccagttgacacggcatgaaatagaaatgacagagaaagaatggaaatattatggtgatgatcctcgaatcagtagaactgtgacccgtgaagacttcttggatatactatatgatattcactatatccttatcaaggctacttatggaaacgttgtgagacaaagccgcatttctgaaatctccatggaagtagccgaaccaggacatgtattagcagggagcccaccagcacacttgatagaaagatgcgattgccctcctggctattctggcttgtcttgtgagacgtgtgcaccaggattttatcgacttcgttctgaaccaggtggccgcactcctggaccaaccttaggaacctgtgttccctgccaatgtaatggacacagcagtcagtgtgatcctgagacctcagtatgccagaattgtcagcatcacactgctggtgacttctgtgagcgctgtgcccttggctactatggaatcgtcaggggattgccaaatgactgtcaaccatgtgcttgtcctctgatttcgcccagcaacaatttcagcccctcttgtgtattggaaggtctggaagattaccgttgcaccgcctgcccaaggggctatgaaggacagtactgtgaaaggtgtgccccaggctatactggcagcccaagcagccccggaggctcctgccaagaatgtgagtgtgacccttatggctccctaccggttccctgtgaccgggtcacgggactctgcacgtgccgccctggagccacaggaaggaagtgtgatggctgcgagcactggcatgcacgcgagggtgcagagtgtgtcttttgtggagacgagtgtacaggccttcttcttggtgacctggctcgtctagagcagatgaccatgaacatcaacctcacgggcccactgcctgctccatataaaattctgtatggtcttgaaaatacaactcaggaactcaagcacctgctatcaccgcaacgggcaccagagaggctcattcagttggcagagggcaacgtgaacacacttgtgatggaaacaaatgagctgctaaccagagcaaccaaagtgacagcagatggtgagcaaacaggacaagatgctgagaggaccaactccagagcagaatccttggaagaattcattaaagggcttgtccaggatgctgaagccataaatgaaaaagctgtacaactaaatgaaaccttaggaaatcaagataagacagcagagagaaacttggaggagcttcaaaaggaaatcgaccggatgctgaaggaactgagaagtaaagatcttcaaacacagaaggaagttgctgaggatgagctcgtggcagcagaaggccttctgaagagagtaaacaagctgtttggagagcccagagcccagaatgaagatatggaaaaggatctccagcagaaactggcagagtacaagaacaaacttgatgatgcttgggatctattgagagaagccactgataaaactcgagatgctaatcgtttgtctgctgccaatcaaaaaaacatgaccatactggagacaaagaaggaggctattgaaggtagcaaacgacaaatagagaacactttaaaggaaggcaatgacatccttgatgaagccaatcgactcttaggtgaaatcaactcagtcatagattatgtcgacgacattaaaactaagttgccaccaatgtccgaggagctgagtgacaaaatagatgacctcgcccaggaaataaaggacagaaggcttgctgagaaggtgttccaggctgagagccatgctgctcagctgaacgactcgtctgctgtacttgatggaatcctggatgaggctaagaacatctctttcaatgccacggcagccttcagagcttacagtaatattaaagactacattgatgaagctgagaaagtggccagagaagccaaagagcttgcccaaggggctacaaaactggcaacaagtcctcagggcttattaaaagaagatgccaaaggctcccttcagaaaagcttcaggatcctcaatgaagccaagaagctagcaaacgatgtgaaaggaaatcacaatgatctaaatgacctgaaaaccaggttagaaactgctgaccttagaaacagtggacttctaggagctctaaatgacaccatggacaagttatcagccattacaaatgacacggctgctaaactgcaggctgtcaaagagaaagccagagaagccaatgacacagcaaaagctgtcctggcccaggttaaggacctgcatcagaacctagatggcctgaagcaaaactacaataaactggcagacagcgtggccaaaacgaacgctgtggtgaaagatccttccaaaaacaaaatcattgcagatgcaggcacttccgtgagaaatctagaacaggaagctgaccggctaatcgacaaactcaagcccatcaaggagcttgaggacaacctaaagaaaaacatttctgaaataaaggaactgatcaaccaagctcggaaacaagctaactctatcaaagtatctgtttcttcgggaggtgactgtgttcgaacatacaggccagaaatcaagaaaggaagctacaataacatcgttgtccatgtcaagaccgctgttgccgacaacctccttttttatcttggaagtgccaaatttattgactttcttgctatagaaatgcgcaaaggcaaagtcagcttcctctgggatgttggctctggagttggccgagtagagtatccagacttgaccatcgacgactcctattggtaccgtattgaagcatcaagaacgggaagaaatggatctatttctgtgagagctttagatggacccaaagccagtatggtacccagcacctaccattcagtgtctcctcccgggtacactatcctagatgtggatgcaaatgcaatgctgtttgttggtggcctgaccggaaaaataaagaaggccgatgctgtacgtgtgatcaccttcaccggctgtatgggagaaacatactttgacaacaaacctataggtttatggaacttccgggagaaagaaggcgactgtaagggatgtactgtcagcccacaagtggaagatagtgaggggactattcagtttgatggtgaaggctatgcattagtgagccgccctatccgctggtaccccaacatctccacagtcatgttcaagttccggacattttcatcaagtgctctcctgatgtatcttgccacacgagacctgaaagatttcatgagtgtagagctcagtgatggacatgtgaaagtcagctatgacctgggctcaggaatgacttccgttgtcagcaatcaaaaccataatgatgggaaatggaaagcattcacgctgtcgcggattcagaaacaagccaacatatcgattgtcgacatcgattctaaccaggaggagaatgtagctacttcatcttctggaaacaactttggtcttgacttgaaagcagatgacaaaatatattttggtggcctgccaactctgagaaacttgagtatgaaagcaaggccagaagtcaatgtgaagaaatactccggctgcctcaaagatattgaaatttcaagaacaccttacaatatactcagcagccctgattatgttggtgtgaccaaaggctgttcactggagaatgtttatacagttagtttccccaagcctggttttgtggagcttgccgctgtgtctattgatgttggaacagaaatcaatctgtcctttagtaccaggaacgagtctgggatcattctcttgggaagtggagggacactcacaccacccaggagaaaacggagacaaaccacacaggcttattatgccatattcctcaacaagggccgcttggaagtgcatctctcctcggggacacggacaatgaggaaaattgtcatcaaaccggagccaaatttgtttcatgatgggagagaacattctgtccacgtagaaagaaccagaggcatcttcactgttcaaattgatgaagacagaagacatatgcaaaacctgacagaggaacagcccatcgaagtgaaaaagctctttgtcgggggtgctcctcctgaatttcagccctccccactcaggaatattccggcctttcaaggctgtgtgtggaaccttgttattaactccatccccatggactttgcgcagcctatagccttcaaaaatgccgacattggccgctgtacctatcaaaagccccgggaagatgagagtgaagcagttccagctgaagttattgtccagcctcagccggtgcccacccctgccttccctttcccggcccccaccatggtgcatggcccttgtgttgcagaatcagaaccagctcttctgacagggagcaagcagtttgggctttccagaaacagccacattgcaattgcttttgatgacaccaaagttaaaaatcgcctcaccattgagctggaggtacgaactgaagctgaatcaggcttgctcttctacatggctcggatcaatcatgctgattttgctactgttcagctgaggaatggcttcccgtacttcagttatgatttggggagtggggacacaagcaccatgatccccacaaaaatcaacgatggccagtggcacaagattaagattgtgagagtgaagcaggagggaattctttatgtggatgatgcctccagccaaaccatcagtcccaagaaagctgacatcctggatgtcgtggggattctgtatgtcggtggattgccgatcaactataccacacgcagaattggtccagtgacttacagcctggatggctgtgttaggaatcttcacatggaacaagcccctgttgatctggaccagcctacctccagctttcacgttgggacatgctttgcgaatgcagagagtgggacttactttgatggaaccggttttgctaaagcagttggtgggttcaaagttggattggaccttcttgtggaatttgaattccgtaccacaagacccactggggtcctcctgggagtcagcagtcagaagatggatggaatgggtattgaaatgatcgacgagaagcttatgttccacgtggataatggcgctggccgattcactgcaatctatgatgctgggatcccaggccacatgtgcaatggacagtggcataaagtcactgccaagaagatcaaaaaccgtcttgagctggtggtagatgggaaccaggtggatgcccagagcccaaactcagcatcgacatcagctgatacaaacgaccctgtttttgttggcggtttcccaggtggcctcaatcagtttggcctgaccaccaacattaggttccgaggctgcatccgatctctgaagctcaccaaaggcactggcaaaccgctggaggttaattttgccaaggccctggaactgaggggtgttcaacctgtatcatgcccgactac

SEQ ID NO: 100 - DNA, 21 bp, artificial sequence
  SYBR-Mm_Tfrc-F qPCR
tgggcactagattggatacct

SEQ ID NO: 101 - DNA, 20 bp, artificial sequence
  SYBR-Mm_Tfrc-R qPCR
atgagctgaccagccacttc

SEQ ID NO: 102 - DNA, 19 bp, artificial sequence
  SYBR-RFP-F qPCR
atggccagctccgaggatg

SEQ ID NO: 103 - DNA, 22 bp, artificial sequence
  SYBR-RFP-R qPCR
gaactgagggctcagaatatcc

SEQ ID NO: 104 - DNA, 20 bp, artificial sequence
  SYBR-hLama F qPCR
tagaacatgtccctgggcag

SEQ ID NO: 105 - DNA, 20 bp, artificial sequence
  SYBR-hLama r qPCR
atacgcgatctggaacacct

SEQ ID NO: 106 - DNA, 20 bp, artificial sequence
  SYBR-Mm-GAPDH-F qPCR
cgtcccgtagacaaaatggt

SEQ ID NO: 107 - DNA, 20 bp, artificial sequence
  SYBR-Mm-GAPDH-R qPCR
tggaagatggtgatgggctt

SEQ ID NO: 108 - protein, 594 aa, Artificial Sequence
  Modified hyperactive PiggyBac R275A/N347S/K375A/D450N/S592G
MGSSLDDEHILSALLQSDDELVGEDSDSEVSDHVSEDDVQSDTEEAFIDEVHEVQPTSSGSEILDEQNVIEQPGSSLASNRILTLPQRTIRGKNKHCWSTSKPTRRSRVSALNIVRSQRGPTRMCRNIYDPLLCFKLFFTDEIISEIVKWTNAEISLKRRESMTSATFRDTNEDEIYAFFGILVMTAVRKDNHMSTDDLFDRSLSMVYVSVMSRDRFDFLIRCLRMDDKSIRPTLRENDVFTPVRKIWDLFIHQCIQNYTPGAHLTIDEQLLGFAGRCPFRVYIPNKPSKYGIKILMMCDSGTKYMINGMPYLGRGTQTNGVPLGEYYVKELSKPVHGSCRNITCDSWFTSIPLAKNLLQEPYKLTIVGTVRSNAREIPEVLKNSRSRPVGTSMFCFDGPLTLVSYKPKPAKMVYLLSSCDEDASINESTGKPQMVMYYNQTKGGVDTLNQMCSVMTCSRKTNRWPMALLYGMINIACINSFIIYSHNVSSKGEKVQSRKKFMRNLYMGLTSSFMRKRLEAPTLKRYLRDNISNILPKEVPGTSDDSTEEPVMKKRTYCTYCPSKIRRKASASCKKCKKVICREHNIDMCQGCF

SEQ ID NO: 109 - protein, 594 aa, Artificial Sequence
  Modified hyperactive PiggyBac N347S/D450N/T560A/S573A/F594L
MGSSLDDEHILSALLQSDDELVGEDSDSEVSDHVSEDDVQSDTEEAFIDEVHEVQPTSSGSEILDEQNVIEQPGSSLASNRILTLPQRTIRGKNKHCWSTSKPTRRSRVSALNIVRSQRGPTRMCRNIYDPLLCFKLFFTDEIISEIVKWTNAEISLKRRESMTSATFRDTNEDEIYAFFGILVMTAVRKDNHMSTDDLFDRSLSMVYVSVMSRDRFDFLIRCLRMDDKSIRPTLRENDVFTPVRKIWDLFIHQCIQNYTPGAHLTIDEQLLGFRGRCPFRVYIPNKPSKYGIKILMMCDSGTKYMINGMPYLGRGTQTNGVPLGEYYVKELSKPVHGSCRNITCDSWFTSIPLAKNLLQEPYKLTIVGTVRSNKREIPEVLKNSRSRPVGTSMFCFDGPLTLVSYKPKPAKMVYLLSSCDEDASINESTGKPQMVMYYNQTKGGVDTLNQMCSVMTCSRKTNRWPMALLYGMINIACINSFIIYSHNVSSKGEKVQSRKKFMRNLYMGLTSSFMRKRLEAPTLKRYLRDNISNILPKEVPGTSDDSTEEPVMKKRTYCAYCPSKIRRKASAACKKCKKVICREHNIDMCQSCL

SEQ ID NO: 110 - protein, 594 aa, Artificial Sequence
  Modified hyperactive PiggyBac N347A/D450N
MGSSLDDEHILSALLQSDDELVGEDSDSEVSDHVSEDDVQSDTEEAFIDEVHEVQPTSSGSEILDEQNVIEQPGSSLASNRILTLPQRTIRGKNKHCWSTSKPTRRSRVSALNIVRSQRGPTRMCRNIYDPLLCFKLFFTDEIISEIVKWTNAEISLKRRESMTSATFRDTNEDEIYAFFGILVMTAVRKDNHMSTDDLFDRSLSMVYVSVMSRDRFDFLIRCLRMDDKSIRPTLRENDVFTPVRKIWDLFIHQCIQNYTPGAHLTIDEQLLGFRGRCPFRVYIPNKPSKYGIKILMMCDSGTKYMINGMPYLGRGTQTNGVPLGEYYVKELSKPVHGSCRNITCDSWFTSIPLAKNLLQEPYKLTIVGTVRSNKREIPEVLKNSRSRPVGTSMFCFDGPLTLVSYKPKPAKMVYLLSSCDEDASINESTGKPQMVMYYNQTKGGVDTLNQMCSVMTCSRKTNRWPMALLYGMINIACINSFIIYSHNVSSKGEKVQSRKKFMRNLYMGLTSSFMRKRLEAPTLKRYLRDNISNILPKEVPGTSDDSTEEPVMKKRTYCTYCPSKIRRKASASCKKCKKVICREHNIDMCQSCF

SEQ ID NO: 111 - protein, 594 aa, Artificial Sequence
  Modified hyperactive PiggyBac R275A/N347S/R372A/D450N/T560A/F594L
MGSSLDDEHILSALLQSDDELVGEDSDSEVSDHVSEDDVQSDTEEAFIDEVHEVQPTSSGSEILDEQNVIEQPGSSLASNRILTLPQRTIRGKNKHCWSTSKPTRRSRVSALNIVRSQRGPTRMCRNIYDPLLCFKLFFTDEIISEIVKWTNAEISLKRRESMTSATFRDTNEDEIYAFFGILVMTAVRKDNHMSTDDLFDRSLSMVYVSVMSRDRFDFLIRCLRMDDKSIRPTLRENDVFTPVRKIWDLFIHQCIQNYTPGAHLTIDEQLLGFAGRCPFRVYIPNKPSKYGIKILMMCDSGTKYMINGMPYLGRGTQTNGVPLGEYYVKELSKPVHGSCRNITCDSWFTSIPLAKNLLQEPYKLTIVGTVASNKREIPEVLKNSRSRPVGTSMFCFDGPLTLVSYKPKPAKMVYLLSSCDEDASINESTGKPQMVMYYNQTKGGVDTLNQMCSVMTCSRKTNRWPMALLYGMINIACINSFIIYSHNVSSKGEKVQSRKKFMRNLYMGLTSSFMRKRLEAPTLKRYLRDNISNILPKEVPGTSDDSTEEPVMKKRTYCAYCPSKIRRKASASCKKCKKVICREHNIDMCQSCL

SEQ ID NO: 112 - protein, 594 aa, Artificial Sequence
  Modified hyperactive PiggyBac R202K/R275A/N347S/R372A/D450N/T560A/F594L
MGSSLDDEHILSALLQSDDELVGEDSDSEVSDHVSEDDVQSDTEEAFIDEVHEVQPTSSGSEILDEQNVIEQPGSSLASNRILTLPQRTIRGKNKHCWSTSKPTRRSRVSALNIVRSQRGPTRMCRNIYDPLLCFKLFFTDEIISEIVKWTNAEISLKRRESMTSATFRDTNEDEIYAFFGILVMTAVRKDNHMSTDDLFDKSLSMVYVSVMSRDRFDFLIRCLRMDDKSIRPTLRENDVFTPVRKIWDLFIHQCIQNYTPGAHLTIDEQLLGFAGRCPFRVYIPNKPSKYGIKILMMCDSGTKYMINGMPYLGRGTQTNGVPLGEYYVKELSKPVHGSCRNITCDSWFTSIPLAKNLLQEPYKLTIVGTVASNKREIPEVLKNSRSRPVGTSMFCFDGPLTLVSYKPKPAKMVYLLSSCDEDASINESTGKPQMVMYYNQTKGGVDTLNQMCSVMTCSRKTNRWPMALLYGMINIACINSFIIYSHNVSSKGEKVQSRKKFMRNLYMGLTSSFMRKRLEAPTLKRYLRDNISNILPKEVPGTSDDSTEEPVMKKRTYCAYCPSKIRRKASASCKKCKKVICREHNIDMCQSCL

SEQ ID NO: 113 - protein, 594 aa, Artificial Sequence
  Modified hyperactive PiggyBac R275A/R277A/N347S/R372A/D450N/T560A/S564P/F594L
MGSSLDDEHILSALLQSDDELVGEDSDSEVSDHVSEDDVQSDTEEAFIDEVHEVQPTSSGSEILDEQNVIEQPGSSLASNRILTLPQRTIRGKNKHCWSTSKPTRRSRVSALNIVRSQRGPTRMCRNIYDPLLCFKLFFTDEIISEIVKWTNAEISLKRRESMTSATFRDTNEDEIYAFFGILVMTAVRKDNHMSTDDLFDRSLSMVYVSVMSRDRFDFLIRCLRMDDKSIRPTLRENDVFTPVRKIWDLFIHQCIQNYTPGAHLTIDEQLLGFAGACPFRVYIPNKPSKYGIKILMMCDSGTKYMINGMPYLGRGTQTNGVPLGEYYVKELSKPVHGSCRNITCDSWFTSIPLAKNLLQEPYKLTIVGTVASNKREIPEVLKNSRSRPVGTSMFCFDGPLTLVSYKPKPAKMVYLLSSCDEDASINESTGKPQMVMYYNQTKGGVDTLNQMCSVMTCSRKTNRWPMALLYGMINIACINSFIIYSHNVSSKGEKVQSRKKFMRNLYMGLTSSFMRKRLEAPTLKRYLRDNISNILPKEVPGTSDDSTEEPVMKKRTYCAYCPPKIRRKASASCKKCKKVICREHNIDMCQSCL

SEQ ID NO: 114 - protein, 5 aa, Artificial Sequence
  SITE 1..5: wherein the sequence can be repeated 1 to 50 times
  Linker
GGGGS

SEQ ID NO: 115 - protein, 5 aa, Artificial Sequence
  SITE 1..5: wherein the sequence can be repeated 1 to 50 times
  Linker
EAAAK

SEQ ID NO: 116 - protein, 3210 aa, Artificial Sequence
  laminin subunit alpha2 isoform X1
MPGAAGVLLLLLLSGGLGGVQAQRPQQQRQSQAHQQRGLFPAVLNLASNALITTNATCGEKGPEMYCKLVEHVPGQPVRNPQCRICNQNSSNPNQRHPITNAIDGKNTWWQSPSIKNGIEYHYVTITLDLQQVFQIAYVIVKAANSPRPGNWILERSLDDVEYKPWQYHAVTDTECLTLYNIYPRTGPPSYAKDDEVICTSFYSKIHPLENGEIHISLINGRPSADDPSPELLEFTSARYIRLRFQRIRTLNADLMMFAHKDPREIDPIVTRRYYYSVKDISVGGMCICYGHARACPLDPATNKSRCECEHNTCGDSCDQCCPGFHQKPWRAGTFLTKTECEACNCHGKAEECYYDENVARRNLSLNIRGKYIGGGVCINCTQNTAGINCETCTDGFFRPKGVSPNYPRPCQPCHCDPIGSLNEVCVKDEKHARRGLAPGSCHCKTGFGGVSCDRCARGYTGYPDCKACNCSGLGSKNEDPCFGPCICKENVEGGDCSRCKSGFFNLQEDNWKGCDECFCSGVSNRCQSSYWTYGKIQDMSGWYLTDLPGRIRVAPQQDDLDSPQQISISNAEARQALPHSYYWSAPAPYLGNKLPAVGGQLTFTISYDLEEEEEDTERVLQLMIILEGNDLSISTAQDEVYLHPSEEHTNVLLLKEESFTIHGTHFPVRRKEFMTVLANLKRVLLQITYSFGMDAIFRLSSVNLESAVSYPTDGSIAAAVEVCQCPPGYTGSSCESCWPRHRRVNGTIFGGICEPCQCFGHAESCDDVTGECLNCKDHTGGPYCDKCLPGFYGEPTKGTSEDCQPCACPLNIPSNNFSPTCHLDRSLGLICDGCPVGYTGPRCERCAEGYFGQPSVPGGSCQPCQCNDNLDFSIPGSCDSLSGSCLICKPGTTGRYCELCADGYFGDAVDAKNCQPCRCNAGGSFSEVCHSQTGQCECRANVQGQRCDKCKPNMWRDPEKRFCVLCDCDPVGSVSPQCDITGRCVCKSGFVGKQCNLGRQVHQQEEQPRRAQRVLGSPQRWAIGSSSGCPRGAYRAPAPAGTFGLQSARGCVPCNCNSFGSKSFDCEESGQCWCQPGVTGKKCDRCAHGYFNFQEGGCTACECSHLGNNCDPKTGRCICPPNTIGEKCSKCAPNTWGHSITTGCKACNCSTVGSLDFQCNVNTGQCNCHPKFSGAKCTECSRGHWNYPRCNLCDCFLPGTDATTCDSETKKCSCSDQTGQCTCKVNVEGIHCDRCRPGKFGLDAKNPLGCSSCYCFGTTTQCSEAKGLIRTWVTLKAEQTILPLVDEALQHTTTKGIVFQHPEIVAHMDLMREDLHLEPFYWKLPEQFEGKKLMAYGGKLKYAIYFEAREETGFSTYNPQVIIRGGTPTHARIIVRHMAAPLIGQLTRHEIEMTEKEWKYYGDDPRVHRTVTREDFLDILYDIHYILIKATYGNFMRQSRISEISMEVAEQGRGTTMTPPADLIEKCDCPLGYSGLSCEACLPGFYRLRSQPGGRTPGPTLGTCVPCQCNGHSSLCDPETSICQNCQHHTAGDFCERCALGYYGIVKGLPNDCQQCACPLISSSNNFSPSCVAEGLDDYRCTACPRGYEGQYCERCAPGYTGSPGNPGGSCQECECDPYGSLPVPCDPVTGFCTCRPGATGRKCDGCKHWHAREGWECVFCGDECTGLLLGDLARLEQMVMSINLTGPLPAPYKMLYGLENMTQELKHLLSPQRAPERLIQLAEGNLNTLVTEMNELLTRATKVTADGEQTGQDAERTNTRAKSLGEFIKELARDAEAVNEKAIKLNETLGTRDEAFERNLEGLQKEIDQMIKELRRKNLETQKEIAEDELVAAEALLKKVKKLFGESRGENEEMEKDLREKLADYKNKVDDAWDLLREATDKIREANRLFAVNQKNMTALEKKKEAVESGKRQIENTLKEGNDILDEANRLADEINSIIDYVEDIQTKLPPMSEELNDKIDDLSQEIKDRKLAEKVSQAESHAAQLNDSSAVLDGILDEAKNISFNATAAFKAYSNIKDYIDEAEKVAKEAKDLAHEATKLATGPRGLLKEDAKGCLQKSFRILNEAKKLANDVKENEDHLNGLKTRIENADARNGDLLRTLNDTLGKLSAIPNDTAAKLQAVKDKARQANDTAKDVLAQITELHQNLDGLKKNYNKLADSVAKTNAVVKDPSKNKIIADADATVKNLEQEADRLIDKLKPIKELEDNLKKNISEIKELINQARKQANSIKVSVSSGGDCIRTYKPEIKKGSYNNIVVNVKTAVADNLLFYLGSAKFIDFLAIEMRKGKVSFLWDVGSGVGRVEYPDLTIDDSYWYRIVASRTGRNGTISVRALDGPKASIVPSTHHSTSPPGYTILDVDANAMLFVGGLTGKLKKADAVRVITFTGCMGETYFDNKPIGLWNFREKEGDCKGCTVSPQVEDSEGTIQFDGEGYALVSRPIRWYPNISTVMFKFRTFSSSALLMYLATRDLRDFMSVELTDGHIKVSYDLGSGMASVVSNQNHNDGKWKSFTLSRIQKQANISIVDIDTNQEENIATSSSGNNFGLDLKADDKIYFGGLPTLRNLSMKARPEVNLKKYSGCLKDIEISRTPYNILSSPDYVGVTKGCSLENVYTVSFPKPGFVELSPVPIDVGTEINLSFSTKNESGIILLGSGGTPAPPRRKRRQTGQAYYAILLNRGRLEVHLSTGARTMRKIVIRPEPNLFHDGREHSVHVERTRGIFTVQVDENRRYMQNLTVEQPIEVKKLFVGGAPPEFQPSPLRNIPPFEGCIWNLVINSVPMDFARPVSFKNADIGRCAHQKLREDEDGAAPAEIVIQPEPVPTPAFPTPTPVLTHGPCAAESEPALLIGSKQFGLSRNSHIAIAFDDTKVKNRLTIELEVRTEAESGLLFYMARINHADFATVQLRNGLPYFSYDLGSGDTHTMIPTKINDGQWHKIKIMRSKQEGILYVDGASNRTISPKKADILDVVGMLYVGGLPINYTTRRIGPVTYSIDGCVRNLHMAEAPADLEQPTSSFHVGTCFANAQRGTYFDGTGFAKAVGGFKVGLDLLVEFEFRTTTTTGVLLGISSQKMDGMGIEMIDEKLMFHVDNGAGRFTAVYDAGVPGHLCDGQWHKVTANKIKHRIELTVDGNQVEAQSPNPASTSADTNDPVFVGGFPDDLKQFGLTTSIPFRGCIRSLKLTKGTGKPLEVNFAKALELRGVQPVSCPAN

SEQ ID NO: 117 - protein, 3207 aa, Artificial Sequence
  laminin subunit alpha2 isoform X2
MPGAAGVLLLLLLSGGLGGVQAQRPQQQRQSQAHQQRGLFPAVLNLASNALITTNATCGEKGPEMYCKLVEHVPGQPVRNPQCRICNQNSSNPNQRHPITNAIDGKNTWWQSPSIKNGIEYHYVTITLDLQQVFQIAYVIVKAANSPRPGNWILERSLDDVEYKPWQYHAVTDTECLTLYNIYPRTGPPSYAKDDEVICTSFYSKIHPLENGEIHISLINGRPSADDPSPELLEFTSARYIRLRFQRIRTLNADLMMFAHKDPREIDPIVTRRYYYSVKDISVGGMCICYGHARACPLDPATNKSRCECEHNTCGDSCDQCCPGFHQKPWRAGTFLTKTECEACNCHGKAEECYYDENVARRNLSLNIRGKYIGGGVCINCTQNTAGINCETCTDGFFRPKGVSPNYPRPCQPCHCDPIGSLNEVCVKDEKHARRGLAPGSCHCKTGFGGVSCDRCARGYTGYPDCKACNCSGLGSKNEDPCFGPCICKENVEGGDCSRCKSGFFNLQEDNWKGCDECFCSGVSNRCQSSYWTYGKIQDMSGWYLTDLPGRIRVAPQQDDLDSPQQISISNAEARQALPHSYYWSAPAPYLGNKLPAVGGQLTFTISYDLEEEEEDTERVLQLMIILEGNDLSISTAQDEVYLHPSEEHTNVLLLKEESFTIHGTHFPVRRKEFMTVLANLKRVLLQITYSFGMDAIFRLSSVNLESAVSYPTDGSIAAAVEVCQCPPGYTGSSCESCWPRHRRVNGTIFGGICEPCQCFGHAESCDDVTGECLNCKDHTGGPYCDKCLPGFYGEPTKGTSEDCQPCACPLNIPSNNFSPTCHLDRSLGLICDGCPVGYTGPRCERCAEGYFGQPSVPGGSCQPCQCNDNLDFSIPGSCDSLSGSCLICKPGTTGRYCELCADGYFGDAVDAKNCQPCRCNAGGSFSEVCHSQTGQCECRANVQGQRCDKCKPNMWRDPEKRFCVLCDCDPVGSVSPQCDITGRCVCKSGFVGKQCNLGRQVHQQEEQPRRAQRVLGSPQRWAIGSSSGCPRGAYRAPAPAGTFGLQSARGCVPCNCNSFGSKSFDCEESGQCWCQPGVTGKKCDRCAHGYFNFQEGGCTACECSHLGNNCDPKTGRCICPPNTIGEKCSKCAPNTWGHSITTGCKACNCSTVGSLDFQCNVNTGQCNCHPKFSGAKCTECSRGHWNYPRCNLCDCFLPGTDATTCDSETKKCSCSDQTGQCTCKVNVEGIHCDRCRPGKFGLDAKNPLGCSSCYCFGTTTQCSEAKGLIRTWVTLKAEQTILPLVDEALQHTTTKGIVFQHPEIVAHMDLMREDLHLEPFYWKLPEQFEGKKLMAYGGKLKYAIYFEAREETGFSTYNPQVIIRGGTPTHARIIVRHMAAPLIGQLTRHEIEMTEKEWKYYGDDPRVHRTVTREDFLDILYDIHYILIKATYGNFMRQSRISEISMEVAEQGRGTTMTPPADLIEKCDCPLGYSGLSCEACLPGFYRLRSQPGGRTPGPTLGTCVPCQCNGHSSLCDPETSICQNCQHHTAGDFCERCALGYYGIVKGLPNDCQQCACPLISSSNNFSPSCVAEGLDDYRCTACPRGYEGQYCERCAPGYTGSPGNPGSCQECECDPYGSLPVPCDPVTGFCTCRPGATGRKCDGCKHWHAREGWECVFCGDECTGLLLGDLARLEQMVMSINLTGPLPAPYKMLYGLENMTQELKHLLSPQRAPERLIQLAEGNLNTLVTEMNELLTRATKVTADGEQTGQDAERTNTRAKSLGEFIKELARDAEAVNEKAIKLNETLGTRDEAFERNLEGLQKEIDQMIKELRRKNLETQKEIAEDELVAAEALLKKVKKLFGESRGENEEMEKDLREKLADYKNKVDDAWDLLREATDKIREANRLFAVNQKNMTALEKKKEAVESGKRQIENTLKEGNDILDEANRLADEINSIIDYVEDIQTKLPPMSEELNDKIDDLSQEIKDRKLAEKVSQAESHAAQLNDSSAVLDGILDEAKNISFNATAAFKAYSNIKDYIDEAEKVAKEAKDLAHEATKLATGPRGLLKEDAKGCLQKSFRILNEAKKLANDVKENEDHLNGLKTRIENADARNGDLLRTLNDTLGKLSAIPNDTAAKLQAVKDKARQANDTAKDVLAQITELHQNLDGLKKNYNKLADSVAKTNAVVKDPSKNIADADATVKNLEQEADRLIDKLKPIKELEDNLKKNISEIKELINQARKQANSIKVSVSSGGDCIRTYKPEIKKGSYNNIVVNVKTAVADNLLFYLGSAKFIDFLAIEMRKGKVSFLWDVGSGVGRVEYPDLTIDDSYWYRIVASRTGRNGTISVRALDGPKASIVPSTHHSTSPPGYTILDVDANAMLFVGGLTGKLKKADAVRVITFTGCMGETYFDNKPIGLWNFREKEGDCKGCTVSPQVEDSEGTIQFDGEGYALVSRPIRWYPNISTVMFKFRTFSSSALLMYLATRDLRDFMSVELTDGHIKVSYDLGSGMASVVSNQNHNDGKWKSFTLSRIQKQANISIVDIDTNQEENIATSSSGNNFGLDLKADDKIYFGGLPTLRNLSMKARPEVNLKKYSGCLKDIEISRTPYNILSSPDYVGVTKGCSLENVYTVSFPKPGFVELSPVPIDVGTEINLSFSTKNESGIILLGSGGTPAPPRRKRRQTGQAYYAILLNRGRLEVHLSTGARTMRKIVIRPEPNLFHDGREHSVHVERTRGIFTVQVDENRRYMQNLTVEQPIEVKKLFVGGAPPEFQPSPLRNIPPFEGCIWNLVINSVPMDFARPVSFKNADIGRCAHQKLREDEDGAAPAEIVIQPEPVPTPAFPTPTPVLTHGPCAAESEPALLIGSKQFGLSRNSHIAIAFDDTKVKNRLTIELEVRTEAESGLLFYMARINHADFATVQLRNGLPYFSYDLGSGDTHTMIPTKINDGQWHKIKIMRSKQEGILYVDGASNRTISPKKADILDVVGMLYVGGLPINYTTRRIGPVTYSIDGCVRNLHMAEAPADLEQPTSSFHVGTCFANAQRGTYFDGTGFAKAVGGFKVGLDLLVEFEFRTTTTTGVLLGISSQKMDGMGIEMIDEKLMFHVDNGAGRFTAVYDAGVPGHLCDGQWHKVTANKIKHRIELTVDGNQVEAQSPNPASTSADTNDPVFVGGFPDDLKQFGLTTSIPFRGCIRSLKLTKGTGKPLEVNFAKALELRGVQPVSCPAN

SEQ ID NO: 118 - protein, 3206 aa, Artificial Sequence
  laminin subunit alpha2 isoform X3
MPGAAGVLLLLLLSGGLGGVQAQRPQQQRQSQAHQQRGLFPAVLNLASNALITTNATCGEKGPEMYCKLVEHVPGQPVRNPQCRICNQNSSNPNQRHPITNAIDGKNTWWQSPSIKNGIEYHYVTITLDLQQVFQIAYVIVKAANSPRPGNWILERSLDDVEYKPWQYHAVTDTECLTLYNIYPRTGPPSYAKDDEVICTSFYSKIHPLENGEIHISLINGRPSADDPSPELLEFTSARYIRLRFQRIRTLNADLMMFAHKDPREIDPIVTRRYYYSVKDISVGGMCICYGHARACPLDPATNKSRCECEHNTCGDSCDQCCPGFHQKPWRAGTFLTKTECEACNCHGKAEECYYDENVARRNLSLNIRGKYIGGGVCINCTQNTAGINCETCTDGFFRPKGVSPNYPRPCQPCHCDPIGSLNEVCVKDEKHARRGLAPGSCHCKTGFGGVSCDRCARGYTGYPDCKACNCSGLGSKNEDPCFGPCICKENVEGGDCSRCKSGFFNLQEDNWKGCDECFCSGVSNRCQSSYWTYGKIQDMSGWYLTDLPGRIRVAPQQDDLDSPQQISISNAEARQALPHSYYWSAPAPYLGNKLPAVGGQLTFTISYDLEEEEEDTERVLQLMIILEGNDLSISTAQDEVYLHPSEEHTNVLLLKEESFTIHGTHFPVRRKEFMTVLANLKRVLLQITYSFGMDAIFRLSSVNLESAVSYPTDGSIAAAVEVCQCPPGYTGSSCESCWPRHRRVNGTIFGGICEPCQCFGHAESCDDVTGECLNCKDHTGGPYCDKCLPGFYGEPTKGTSEDCQPCACPLNIPSNNFSPTCHLDRSLGLICDGCPVGYTGPRCERCAEGYFGQPSVPGGSCQPCQCNDNLDFSIPGSCDSLSGSCLICKPGTTGRYCELCADGYFGDAVDAKNCQPCRCNAGGSFSEVCHSQTGQCECRANVQGQRCDKCKPNMWRDPEKRFCVLCDCDPVGSVSPQCDITGRCVCKSGFVGKQCNLGRQVHQQEEQPRRAQRVLGSPQRWAIGSSSGCPRGAYRAPAPAGTFGLQSARGCVPCNCNSFGSKSFDCEESGQCWCQPGVTGKKCDRCAHGYFNFQEGGCTACECSHLGNNCDPKTGRCICPPNTIGEKCSKCAPNTWGHSITTGCKACNCSTVGSLDFQCNVNTGQCNCHPKFSGAKCTECSRGHWNYPRCNLCDCFLPGTDATTCDSETKKCSCSDQTGQCTCKVNVEGIHCDRCRPGKFGLDAKNPLGCSSCYCFGTTTQCSEAKGLIRTWVTLKAEQTILPLVDEALQHTTTKGIVFQHPEIVAHMDLMREDLHLEPFYWKLPEQFEGKKLMAYGGKLKYAIYFEAREETGFSTYNPQVIIRGGTPTHARIIVRHMAAPLIGQLTRHEIEMTEKEWKYYGDDPRVHRTVTREDFLDILYDIHYILIKATYGNFMRQSRISEISMEVAEQGRGTTMTPPADLIEKCDCPLGYSGLSCEACLPGFYRLRSQPGGRTPGPTLGTCVPCQCNGHSSLCDPETSICQNCQHHTAGDFCERCALGYYGIVKGLPNDCQQCACPLISSSNNFSPSCVAEGLDDYRCTACPRGYEGQYCERCAPGYTGSPGNPGGSCQECECDPYGSLPVPCDPVTGFCTCRPGATGRKCDGCKHWHAREGWECVFCGDECTGLLLGDLARLEQMVMSINLTGPLPAPYKMLYGLENMTQELKHLLSPQRAPERLIQLAEGNLNTLVTEMNELLTRATKVTADGEQTGQDAERTNTRAKSLGEFIKELARDAEAVNEKAIKLNETLGTRDEAFERNLEGLQKEIDQMIKELRRKNLETQKEIAEDELVAAEALLKKVKKLFGESRGENEEMEKDLREKLADYKNKVDDAWDLLREATDKIREANRLFAVNQKNMTALEKKKEAVESGKRQIENTLKEGNDILDEANRLADEINSIIDYVEDIQTKLPPMSEELNDKIDDLSQEIKDRKLAEKVSQAESHAAQLNDSSAVLDGILDEAKNISFNATAAFKAYSNIKDYIDEAEKVAKEAKDLAHEATKLATGPRGLLKEDAKGCLQKSFRILNEAKKLANDVKENEDHLNGLKTRIENADARNGDLLRTLNDTLGKLSAIPNDTAAKLQAVKDKARQANDTAKDVLAQITELHQNLDGLKKNYNKLADSVAKTNAVVKDPSKNKIIADADATVKNLEQEADRLIDKLKPIKELEDNLKKNISEIKELINQARKQANSIKVSVSSGGDCIRTYKPEIKKGSYNNIVVNVKTAVADNLLFYLGSAKFIDFLAIEMRKGKVSFLWDVGSGVGRVEYPDLTIDDSYWYRIVASRTGRNGTISVRALDGPKASIVPSTHHSTSPPGYTILDVDANAMLFVGGLTGKLKKADAVRVITFTGCMGETYFDNKPIGLWNFREKEGDCKGCTVSPQVEDSEGTIQFDGEGYALVSRPIRWYPNISTVMFKFRTFSSSALLMYLATRDLRDFMSVELTDGHIKVSYDLGSGMASVVSNQNHNDGKWKSFTLSRIQKQANISIVDIDTNQEENIATSSSGNNFGLDLKADDKIYFGGLPTLRNLRPEVNLKKYSGCLKDIEISRTPYNILSSPDYVGVTKGCSLENVYTVSFPKPGFVELSPVPIDVGTEINLSFSTKNESGIILLGSGGTPAPPRRKRRQTGQAYYAILLNRGRLEVHLSTGARTMRKIVIRPEPNLFHDGREHSVHVERTRGIFTVQVDENRRYMQNLTVEQPIEVKKLFVGGAPPEFQPSPLRNIPPFEGCIWNLVINSVPMDFARPVSFKNADIGRCAHQKLREDEDGAAPAEIVIQPEPVPTPAFPTPTPVLTHGPCAAESEPALLIGSKQFGLSRNSHIAIAFDDTKVKNRLTIELEVRTEAESGLLFYMARINHADFATVQLRNGLPYFSYDLGSGDTHTMIPTKINDGQWHKIKIMRSKQEGILYVDGASNRTISPKKADILDVVGMLYVGGLPINYTTRRIGPVTYSIDGCVRNLHMAEAPADLEQPTSSFHVGTCFANAQRGTYFDGTGFAKAVGGFKVGLDLLVEFEFRTTTTTGVLLGISSQKMDGMGIEMIDEKLMFHVDNGAGRFTAVYDAGVPGHLCDGQWHKVTANKIKHRIELTVDGNQVEAQSPNPASTSADTNDPVFVGGFPDDLKQFGLTTSIPFRGCIRSLKLTKGTGKPLEVNFAKALELRGVQPVSCPAN

SEQ ID NO: 119 - protein, 3212 aa, Artificial Sequence
  laminin subunit alpha2 isoform X4
MQWCFSVLMWRSQETSYNSEKHLMLAAVAVRLAHELRARGLFPAVLNLASNALITTNATCGEKGPEMYCKLVEHVPGQPVRNPQCRICNQNSSNPNQRHPITNAIDGKNTWWQSPSIKNGIEYHYVTITLDLQQVFQIAYVIVKAANSPRPGNWILERSLDDVEYKPWQYHAVTDTECLTLYNIYPRTGPPSYAKDDEVICTSFYSKIHPLENGEIHISLINGRPSADDPSPELLEFTSARYIRLRFQRIRTLNADLMMFAHKDPREIDPIVTRRYYYSVKDISVGGMCICYGHARACPLDPATNKSRCECEHNTCGDSCDQCCPGFHQKPWRAGTFLTKTECEACNCHGKAEECYYDENVARRNLSLNIRGKYIGGGVCINCTQNTAGINCETCTDGFFRPKGVSPNYPRPCQPCHCDPIGSLNEVCVKDEKHARRGLAPGSCHCKTGFGGVSCDRCARGYTGYPDCKACNCSGLGSKNEDPCFGPCICKENVEGGDCSRCKSGFFNLQEDNWKGCDECFCSGVSNRCQSSYWTYGKIQDMSGWYLTDLPGRIRVAPQQDDLDSPQQISISNAEARQALPHSYYWSAPAPYLGNKLPAVGGQLTFTISYDLEEEEEDTERVLQLMIILEGNDLSISTAQDEVYLHPSEEHTNVLLLKEESFTIHGTHFPVRRKEFMTVLANLKRVLLQITYSFGMDAIFRLSSVNLESAVSYPTDGSIAAAVEVCQCPPGYTGSSCESCWPRHRRVNGTIFGGICEPCQCFGHAESCDDVTGECLNCKDHTGGPYCDKCLPGFYGEPTKGTSEDCQPCACPLNIPSNNFSPTCHLDRSLGLICDGCPVGYTGPRCERCAEGYFGQPSVPGGSCQPCQCNDNLDFSIPGSCDSLSGSCLICKPGTTGRYCELCADGYFGDAVDAKNCQPCRCNAGGSFSEVCHSQTGQCECRANVQGQRCDKCKPNMWRDPEKRFCVLCDCDPVGSVSPQCDITGRCVCKSGFVGKQCNLGRQVHQQEEQPRRAQRVLGSPQRWAIGSSSGCPRGAYRAPAPAGTFGLQSARGCVPCNCNSFGSKSFDCEESGQCWCQPGVTGKKCDRCAHGYFNFQEGGCTACECSHLGNNCDPKTGRCICPPNTIGEKCSKCAPNTWGHSITTGCKACNCSTVGSLDFQCNVNTGQCNCHPKFSGAKCTECSRGHWNYPRCNLCDCFLPGTDATTCDSETKKCSCSDQTGQCTCKVNVEGIHCDRCRPGKFGLDAKNPLGCSSCYCFGTTTQCSEAKGLIRTWVTLKAEQTILPLVDEALQHTTTKGIVFQHPEIVAHMDLMREDLHLEPFYWKLPEQFEGKKLMAYGGKLKYAIYFEAREETGFSTYNPQVIIRGGTPTHARIIVRHMAAPLIGQLTRHEIEMTEKEWKYYGDDPRVHRTVTREDFLDILYDIHYILIKATYGNFMRQSRISEISMEVAEQGRGTTMTPPADLIEKCDCPLGYSGLSCEACLPGFYRLRSQPGGRTPGPTLGTCVPCQCNGHSSLCDPETSICQNCQHHTAGDFCERCALGYYGIVKGLPNDCQQCACPLISSSNNFSPSCVAEGLDDYRCTACPRGYEGQYCERCAPGYTGSPGNPGGSCQECECDPYGSLPVPCDPVTGFCTCRPGATGRKCDGCKHWHAREGWECVFCGDECTGLLLGDLARLEQMVMSINLTGPLPAPYKMLYGLENMTQELKHLLSPQRAPERLIQLAEGNLNTLVTEMNELLTRATKVTADGEQTGQDAERTNTRAKSLGEFIKELARDAEAVNEKAIKLNETLGTRDEAFERNLEGLQKEIDQMIKELRRKNLETQKEIAEDELVAAEALLKKVKKLFGESRGENEEMEKDLREKLADYKNKVDDAWDLLREATDKIREANRLFAVNQKNMTALEKKKEAVESGKRQIENTLKEGNDILDEANRLADEINSIIDYVEDIQTKLPPMSEELNDKIDDLSQEIKDRKLAEKVSQAESHAAQLNDSSAVLDGILDEAKNISFNATAAFKAYSNIKDYIDEAEKVAKEAKDLAHEATKLATGPRGLLKEDAKGCLQKSFRILNEAKKLANDVKENEDHLNGLKTRIENADARNGDLLRTLNDTLGKLSAIPNDTAAKLQAVKDKARQANDTAKDVLAQITELHQNLDGLKKNYNKLADSVAKTNAVVKDPSKNKIIADADATVKNLEQEADRLIDKLKPIKELEDNLKKNISEIKELINQARKQANSIKVSVSSGGDCIRTYKPEIKKGSYNNIVVNVKTAVADNLLFYLGSAKFIDFLAIEMRKGKVSFLWDVGSGVGRVEYPDLTIDDSYWYRIVASRTGRNGTISVRALDGPKASIVPSTHHSTSPPGYTILDVDANAMLFVGGLTGKLKKADAVRVITFTGCMGETYFDNKPIGLWNFREKEGDCKGCTVSPQVEDSEGTIQFDGEGYALVSRPIRWYPNISTVMFKFRTFSSSALLMYLATRDLRDFMSVELTDGHIKVSYDLGSGMASVVSNQNHNDGKWKSFTLSRIQKQANISIVDIDTNQEENIATSSSGNNFGLDLKADDKIYFGGLPTLRNLSMKARPEVNLKKYSGCLKDIEISRTPYNILSSPDYVGVTKGCSLENVYTVSFPKPGFVELSPVPIDVGTEINLSFSTKNESGIILLGSGGTPAPPRRKRRQTGQAYYAILLNRGRLEVHLSTGARTMRKIVIRPEPNLFHDGREHSVHVERTRGIFTVQVDENRRYMQNLTVEQPIEVKKLFVGGAPPEFQPSPLRNIPPFEGCIWNLVINSVPMDFARPVSFKNADIGRCAHQKLREDEDGAAPAEIVIQPEPVPTPAFPTPTPVLTHGPCAAESEPALLIGSKQFGLSRNSHIAIAFDDTKVKNRLTIELEVRTEAESGLLFYMARINHADFATVQLRNGLPYFSYDLGSGDTHTMIPTKINDGQWHKIKIMRSKQEGILYVDGASNRTISPKKADILDVVGMLYVGGLPINYTTRRIGPVTYSIDGCVRNLHMAEAPADLEQPTSSFHVGTCFANAQRGTYFDGTGFAKAVGGFKVGLDLLVEFEFRTTTTTGVLLGISSQKMDGMGIEMIDEKLMFHVDNGAGRFTAVYDAGVPGHLCDGQWHKVTANKIKHRIELTVDGNQVEAQSPNPASTSADTNDPVFVGGFPDDLKQFGLTTSIPFRGCIRSLKLTKGTGKPLEVNFAKALELRGVQPVSCPAN

SEQ ID NO: 120 - protein, 2587 aa, Artificial Sequence
  laminin subunit alpha2 isoform X5
MIILEGNDLSISTAQDEVYLHPSEEHTNVLLLKEESFTIHGTHFPVRRKEFMTVLANLKRVLLQITYSFGMDAIFRLSSVNLESAVSYPTDGSIAAAVEVCQCPPGYTGSSCESCWPRHRRVNGTIFGGICEPCQCFGHAESCDDVTGECLNCKDHTGGPYCDKCLPGFYGEPTKGTSEDCQPCACPLNIPSNNFSPTCHLDRSLGLICDGCPVGYTGPRCERCAEGYFGQPSVPGGSCQPCQCNDNLDFSIPGSCDSLSGSCLICKPGTTGRYCELCADGYFGDAVDAKNCQPCRCNAGGSFSEVCHSQTGQCECRANVQGQRCDKCKPNMWRDPEKRFCVLCDCDPVGSVSPQCDITGRCVCKSGFVGKQCNLGRQVHQQEEQPRRAQRVLGSPQRWAIGSSSGCPRGAYRAPAPAGTFGLQSARGCVPCNCNSFGSKSFDCEESGQCWCQPGVTGKKCDRCAHGYFNFQEGGCTACECSHLGNNCDPKTGRCICPPNTIGEKCSKCAPNTWGHSITTGCKACNCSTVGSLDFQCNVNTGQCNCHPKFSGAKCTECSRGHWNYPRCNLCDCFLPGTDATTCDSETKKCSCSDQTGQCTCKVNVEGIHCDRCRPGKFGLDAKNPLGCSSCYCFGTTTQCSEAKGLIRTWVTLKAEQTILPLVDEALQHTTTKGIVFQHPEIVAHMDLMREDLHLEPFYWKLPEQFEGKKLMAYGGKLKYAIYFEAREETGFSTYNPQVIIRGGTPTHARIIVRHMAAPLIGQLTRHEIEMTEKEWKYYGDDPRVHRTVTREDFLDILYDIHYILIKATYGNFMRQSRISEISMEVAEQGRGTTMTPPADLIEKCDCPLGYSGLSCEACLPGFYRLRSQPGGRTPGPTLGTCVPCQCNGHSSLCDPETSICQNCQHHTAGDFCERCALGYYGIVKGLPNDCQQCACPLISSSNNFSPSCVAEGLDDYRCTACPRGYEGQYCERCAPGYTGSPGNPGGSCQECECDPYGSLPVPCDPVTGFCTCRPGATGRKCDGCKHWHAREGWECVFCGDECTGLLLGDLARLEQMVMSINLTGPLPAPYKMLYGLENMTQELKHLLSPQRAPERLIQLAEGNLNTLVTEMNELLTRATKVTADGEQTGQDAERTNTRAKSLGEFIKELARDAEAVNEKAIKLNETLGTRDEAFERNLEGLQKEIDQMIKELRRKNLETQKEIAEDELVAAEALLKKVKKLFGESRGENEEMEKDLREKLADYKNKVDDAWDLLREATDKIREANRLFAVNQKNMTALEKKKEAVESGKRQIENTLKEGNDILDEANRLADEINSIIDYVEDIQTKLPPMSEELNDKIDDLSQEIKDRKLAEKVSQAESHAAQLNDSSAVLDGILDEAKNISFNATAAFKAYSNIKDYIDEAEKVAKEAKDLAHEATKLATGPRGLLKEDAKGCLQKSFRILNEAKKLANDVKENEDHLNGLKTRIENADARNGDLLRTLNDTLGKLSAIPNDTAAKLQAVKDKARQANDTAKDVLAQITELHQNLDGLKKNYNKLADSVAKTNAVVKDPSKNKIIADADATVKNLEQEADRLIDKLKPIKELEDNLKKNISEIKELINQARKQANSIKVSVSSGGDCIRTYKPEIKKGSYNNIVVNVKTAVADNLLFYLGSAKFIDFLAIEMRKGKVSFLWDVGSGVGRVEYPDLTIDDSYWYRIVASRTGRNGTISVRALDGPKASIVPSTHHSTSPPGYTILDVDANAMLFVGGLTGKLKKADAVRVITFTGCMGETYFDNKPIGLWNFREKEGDCKGCTVSPQVEDSEGTIQFDGEGYALVSRPIRWYPNISTVMFKFRTFSSSALLMYLATRDLRDFMSVELTDGHIKVSYDLGSGMASVVSNQNHNDGKWKSFTLSRIQKQANISIVDIDTNQEENIATSSSGNNFGLDLKADDKIYFGGLPTLRNLSMKARPEVNLKKYSGCLKDIEISRTPYNILSSPDYVGVTKGCSLENVYTVSFPKPGFVELSPVPIDVGTEINLSFSTKNESGIILLGSGGTPAPPRRKRRQTGQAYYAILLNRGRLEVHLSTGARTMRKIVIRPEPNLFHDGREHSVHVERTRGIFTVQVDENRRYMQNLTVEQPIEVKKLFVGGAPPEFQPSPLRNIPPFEGCIWNLVINSVPMDFARPVSFKNADIGRCAHQKLREDEDGAAPAEIVIQPEPVPTPAFPTPTPVLTHGPCAAESEPALLIGSKQFGLSRNSHIAIAFDDTKVKNRLTIELEVRTEAESGLLFYMARINHADFATVQLRNGLPYFSYDLGSGDTHTMIPTKINDGQWHKIKIMRSKQEGILYVDGASNRTISPKKADILDVVGMLYVGGLPINYTTRRIGPVTYSIDGCVRNLHMAEAPADLEQPTSSFHVGTCFANAQRGTYFDGTGFAKAVGGFKVGLDLLVEFEFRTTTTTGVLLGISSQKMDGMGIEMIDEKLMFHVDNGAGRFTAVYDAGVPGHLCDGQWHKVTANKIKHRIELTVDGNQVEAQSPNPASTSADTNDPVFVGGFPDDLKQFGLTTSIPFRGCIRSLKLTKGTGKPLEVNFAKALELRGVQPVSCPAN

SEQ ID NO: 121 - protein, 1916 aa, Artificial Sequence
  laminin subunit alpha2 isoform X6
MPGAAGVLLLLLLSGGLGGVQAQRPQQQRQSQAHQQRGLFPAVLNLASNALITTNATCGEKGPEMYCKLVEHVPGQPVRNPQCRICNQNSSNPNQRHPITNAIDGKNTWWQSPSIKNGIEYHYVTITLDLQQVFQIAYVIVKAANSPRPGNWILERSLDDVEYKPWQYHAVTDTECLTLYNIYPRTGPPSYAKDDEVICTSFYSKIHPLENGEIHISLINGRPSADDPSPELLEFTSARYIRLRFQRIRTLNADLMMFAHKDPREIDPIVTRRYYYSVKDISVGGMCICYGHARACPLDPATNKSRCECEHNTCGDSCDQCCPGFHQKPWRAGTFLTKTECEACNCHGKAEECYYDENVARRNLSLNIRGKYIGGGVCINCTQNTAGINCETCTDGFFRPKGVSPNYPRPCQPCHCDPIGSLNEVCVKDEKHARRGLAPGSCHCKTGFGGVSCDRCARGYTGYPDCKACNCSGLGSKNEDPCFGPCICKENVEGGDCSRCKSGFFNLQEDNWKGCDECFCSGVSNRCQSSYWTYGKIQDMSGWYLTDLPGRIRVAPQQDDLDSPQQISISNAEARQALPHSYYWSAPAPYLGNKLPAVGGQLTFTISYDLEEEEEDTERVLQLMIILEGNDLSISTAQDEVYLHPSEEHTNVLLLKEESFTIHGTHFPVRRKEFMTVLANLKRVLLQITYSFGMDAIFRLSSVNLESAVSYPTDGSIAAAVEVCQCPPGYTGSSCESCWPRHRRVNGTIFGGICEPCQCFGHAESCDDVTGECLNCKDHTGGPYCDKCLPGFYGEPTKGTSEDCQPCACPLNIPSNNFSPTCHLDRSLGLICDGCPVGYTGPRCERCAEGYFGQPSVPGGSCQPCQCNDNLDFSIPGSCDSLSGSCLICKPGTTGRYCELCADGYFGDAVDAKNCQPCRCNAGGSFSEVCHSQTGQCECRANVQGQRCDKCKPNMWRDPEKRFCVLCDCDPVGSVSPQCDITGRCVCKSGFVGKQCNLGRQVHQQEEQPRRAQRVLGSPQRWAIGSSSGCPRGAYRAPAPAGTFGLQSARGCVPCNCNSFGSKSFDCEESGQCWCQPGVTGKKCDRCAHGYFNFQEGGCTACECSHLGNNCDPKTGRCICPPNTIGEKCSKCAPNTWGHSITTGCKACNCSTVGSLDFQCNVNTGQCNCHPKFSGAKCTECSRGHWNYPRCNLCDCFLPGTDATTCDSETKKCSCSDQTGQCTCKVNVEGIHCDRCRPGKFGLDAKNPLGCSSCYCFGTTTQCSEAKGLIRTWVTLKAEQTILPLVDEALQHTTTKGIVFQHPEIVAHMDLMREDLHLEPFYWKLPEQFEGKKLMAYGGKLKYAIYFEAREETGFSTYNPQVIIRGGTPTHARIIVRHMAAPLIGQLTRHEIEMTEKEWKYYGDDPRVHRTVTREDFLDILYDIHYILIKATYGNFMRQSRISEISMEVAEQGRGTTMTPPADLIEKCDCPLGYSGLSCEACLPGFYRLRSQPGGRTPGPTLGTCVPCQCNGHSSLCDPETSICQNCQHHTAGDFCERCALGYYGIVKGLPNDCQQCACPLISSSNNFSPSCVAEGLDDYRCTACPRGYEGQYCERCAPGYTGSPGNPGGSCQECECDPYGSLPVPCDPVTGFCTCRPGATGRKCDGCKHWHAREGWECVFCGDECTGLLLGDLARLEQMVMSINLTGPLPAPYKMLYGLENMTQELKHLLSPQRAPERLIQLAEGNLNTLVTEMNELLTRATKVTADGEQTGQDAERTNTRAKSLGEFIKELARDAEAVNEKAIKLNETLGTRDEAFERNLEGLQKEIDQMIKELRRKNLETQKEIAEDELVAAEALLKKVKKLFGESRGENEEMEKDLREKLADYKNKVDDAWDLLREATDKIREANRLFAVNQKNMTALEQLPAKVIKTNQSI

SEQ ID NO: 122 - protein, 594 aa, Artificial Sequence
  Modified Hyperactive Piggybac triple mutant D450N/R372A/K375A/R376A
MGSSLDDEHILSALLQSDDELVGEDSDSEVSDHVSEDDVQSDTEEAFIDEVHEVQPTSSGSEILDEQNVIEQPGSSLASNRILTLPQRTIRGKNKHCWSTSKPTRRSRVSALNIVRSQRGPTRMCRNIYDPLLCFKLFFTDEIISEIVKWTNAEISLKRRESMTSATFRDTNEDEIYAFFGILVMTAVRKDNHMSTDDLFDRSLSMVYVSVMSRDRFDFLIRCLRMDDKSIRPTLRENDVFTPVRKIWDLFIHQCIQNYTPGAHLTIDEQLLGFRGRCPFRVYIPNKPSKYGIKILMMCDSGTKYMINGMPYLGRGTQTNGVPLGEYYVKELSKPVHGSCRNITCDNWFTSIPLAKNLLQEPYKLTIVGTVASNAAEIPEVLKNSRSRPVGTSMFCFDGPLTLVSYKPKPAKMVYLLSSCDEDASINESTGKPQMVMYYNQTKGGVDTLNQMCSVMTCSRKTNRWPMALLYGMINIACINSFIIYSHNVSSKGEKVQSRKKFMRNLYMGLTSSFMRKRLEAPTLKRYLRDNISNILPKEVPGTSDDSTEEPVMKKRTYCTYCPSKIRRKASASCKKCKKVICREHNIDMCQSCF

SEQ ID NO: 123 - protein, 594 aa, Artificial Sequence
  Modified hyperactive PiggyBac R245A/N347S/R372A/D450N/T560A/S564P/S573A/S592G
MGSSLDDEHILSALLQSDDELVGEDSDSEVSDHVSEDDVQSDTEEAFIDEVHEVQPTSSGSEILDEQNVIEQPGSSLASNRILTLPQRTIRGKNKHCWSTSKPTRRSRVSALNIVRSQRGPTRMCRNIYDPLLCFKLFFTDEIISEIVKWTNAEISLKRRESMTSATFRDTNEDEIYAFFGILVMTAVRKDNHMSTDDLFDRSLSMVYVSVMSRDRFDFLIRCLRMDDKSIRPTLRENDVFTPVAKIWDLFIHQCIQNYTPGAHLTIDEQLLGFRGRCPFRVYIPNKPSKYGIKILMMCDSGTKYMINGMPYLGRGTQTNGVPLGEYYVKELSKPVHGSCRNITCDSWFTSIPLAKNLLQEPYKLTIVGTVASNKREIPEVLKNSRSRPVGTSMFCFDGPLTLVSYKPKPAKMVYLLSSCDEDASINESTGKPQMVMYYNQTKGGVDTLNQMCSVMTCSRKTNRWPMALLYGMINIACINSFIIYSHNVSSKGEKVQSRKKFMRNLYMGLTSSFMRKRLEAPTLKRYLRDNISNILPKEVPGTSDDSTEEPVMKKRTYCAYCPPKIRRKASAACKKCKKVICREHNIDMCQGCF

SEQ ID NO: 124 - protein, 594 aa, Artificial Sequence
  Modified hyperactive PiggyBac R277A/G325A/N347A/K375A/D450N/T560A/S564P/S573A/S592G/F594L
MGSSLDDEHILSALLQSDDELVGEDSDSEVSDHVSEDDVQSDTEEAFIDEVHEVQPTSSGSEILDEQNVIEQPGSSLASNRILTLPQRTIRGKNKHCWSTSKPTRRSRVSALNIVRSQRGPTRMCRNIYDPLLCFKLFFTDEIISEIVKWTNAEISLKRRESMTSATFRDTNEDEIYAFFGILVMTAVRKDNHMSTDDLFDRSLSMVYVSVMSRDRFDFLIRCLRMDDKSIRPTLRENDVFTPVRKIWDLFIHQCIQNYTPGAHLTIDEQLLGFRGACPFRVYIPNKPSKYGIKILMMCDSGTKYMINGMPYLGRGTQTNGVPLAEYYVKELSKPVHGSCRNITCDAWFTSIPLAKNLLQEPYKLTIVGTVRSNAREIPEVLKNSRSRPVGTSMFCFDGPLTLVSYKPKPAKMVYLLSSCDEDASINESTGKPQMVMYYNQTKGGVDTLNQMCSVMTCSRKTNRWPMALLYGMINIACINSFIIYSHNVSSKGEKVQSRKKFMRNLYMGLTSSFMRKRLEAPTLKRYLRDNISNILPKEVPGTSDDSTEEPVMKKRTYCAYCPPKIRRKASAACKKCKKVICREHNIDMCQGCL

SEQ ID NO: 125 - protein, 594 aa, Artificial Sequence
  Modified hyperactive PiggyBac V34M/R275A/G325A/N347S/S351A/R372A/K375A/D450N/T560A/S564P
MGSSLDDEHILSALLQSDDELVGEDSDSEVSDHMSEDDVQSDTEEAFIDEVHEVQPTSSGSEILDEQNVIEQPGSSLASNRILTLPQRTIRGKNKHCWSTSKPTRRSRVSALNIVRSQRGPTRMCRNIYDPLLCFKLFFTDEIISEIVKWTNAEISLKRRESMTSATFRDTNEDEIYAFFGILVMTAVRKDNHMSTDDLFDRSLSMVYVSVMSRDRFDFLIRCLRMDDKSIRPTLRENDVFTPVRKIWDLFIHQCIQNYTPGAHLTIDEQLLGFAGRCPFRVYIPNKPSKYGIKILMMCDSGTKYMINGMPYLGRGTQTNGVPLAEYYVKELSKPVHGSCRNITCDSWFTAIPLAKNLLQEPYKLTIVGTVASNAREIPEVLKNSRSRPVGTSMFCFDGPLTLVSYKPKPAKMVYLLSSCDEDASINESTGKPQMVMYYNQTKGGVDTLNQMCSVMTCSRKTNRWPMALLYGMINIACINSFIIYSHNVSSKGEKVQSRKKFMRNLYMGLTSSFMRKRLEAPTLKRYLRDNISNILPKEVPGTSDDSTEEPVMKKRTYCAYCPPKIRRKASASCKKCKKVICREHNIDMCQSCF

SEQ ID NO: 126 - protein, 594 aa, Artificial Sequence
  Modified hyperactive PiggyBac G325A/N347S/K375A/D450N/S573A/M589V/S592G
MGSSLDDEHILSALLQSDDELVGEDSDSEVSDHVSEDDVQSDTEEAFIDEVHEVQPTSSGSEILDEQNVIEQPGSSLASNRILTLPQRTIRGKNKHCWSTSKPTRRSRVSALNIVRSQRGPTRMCRNIYDPLLCFKLFFTDEIISEIVKWTNAEISLKRRESMTSATFRDTNEDEIYAFFGILVMTAVRKDNHMSTDDLFDRSLSMVYVSVMSRDRFDFLIRCLRMDDKSIRPTLRENDVFTPVRKIWDLFIHQCIQNYTPGAHLTIDEQLLGFRGRCPFRVYIPNKPSKYGIKILMMCDSGTKYMINGMPYLGRGTQTNGVPLAEYYVKELSKPVHGSCRNITCDSWFTSIPLAKNLLQEPYKLTIVGTVRSNAREIPEVLKNSRSRPVGTSMFCFDGPLTLVSYKPKPAKMVYLLSSCDEDASINESTGKPQMVMYYNQTKGGVDTLNQMCSVMTCSRKTNRWPMALLYGMINIACINSFIIYSHNVSSKGEKVQSRKKFMRNLYMGLTSSFMRKRLEAPTLKRYLRDNISNILPKEVPGTSDDSTEEPVMKKRTYCTYCPSKIRRKASAACKKCKKVICREHNIDVCQGCF

SEQ ID NO: 127 - protein, 594 aa, Artificial Sequence
  Modified hyperactive PiggyBac S230N/R277A/N347S/K375A/D450N
MGSSLDDEHILSALLQSDDELVGEDSDSEVSDHVSEDDVQSDTEEAFIDEVHEVQPTSSGSEILDEQNVIEQPGSSLASNRILTLPQRTIRGKNKHCWSTSKPTRRSRVSALNIVRSQRGPTRMCRNIYDPLLCFKLFFTDEIISEIVKWTNAEISLKRRESMTSATFRDTNEDEIYAFFGILVMTAVRKDNHMSTDDLFDRSLSMVYVSVMSRDRFDFLIRCLRMDDKNIRPTLRENDVFTPVRKIWDLFIHQCIQNYTPGAHLTIDEQLLGFRGACPFRVYIPNKPSKYGIKILMMCDSGTKYMINGMPYLGRGTQTNGVPLGEYYVKELSKPVHGSCRNITCDSWFTSIPLAKNLLQEPYKLTIVGTVRSNKREIPEVLANSRSRPVGTSMFCFDGPLTLVSYKPKPAKMVYLLSSCDEDASINESTGKPQMVMYYNQTKGGVDTLNQMCSVMTCSRKTNRWPMALLYGMINIACINSFIIYSHNVSSKGEKVQSRKKFMRNLYMGLTSSFMRKRLEAPTLKRYLRDNISNILPKEVPGTSDDSTEEPVMKKRTYCTYCPSKIRRKASASCKKCKKVICREHNIDMCQSCF

SEQ ID NO: 128 - protein, 594 aa, Artificial Sequence
  Modified hyperactive PiggyBac T43I/R372A/K375A/A411T/D450N
MGSSLDDEHILSALLQSDDELVGEDSDSEVSDHVSEDDVQSDIEEAFIDEVHEVQPTSSGSEILDEQNVIEQPGSSLASNRILTLPQRTIRGKNKHCWSTSKPTRRSRVSALNIVRSQRGPTRMCRNIYDPLLCFKLFFTDEIISEIVKWTNAEISLKRRESMTSATFRDTNEDEIYAFFGILVMTAVRKDNHMSTDDLFDRSLSMVYVSVMSRDRFDFLIRCLRMDDKSIRPTLRENDVFTPVRKIWDLFIHQCIQNYTPGAHLTIDEQLLGFRGRCPFRVYIPNKPSKYGIKILMMCDSGTKYMINGMPYLGRGTQTNGVPLGEYYVKELSKPVHGSCRNITCDNWFTSIPLAKNLLQEPYKLTIVGTVASNAREIPEVLKNSRSRPVGTSMFCFDGPLTLVSYKPKPTKMVYLLSSCDEDASINESTGKPQMVMYYNQTKGGVDTLNQMCSVMTCSRKTNRWPMALLYGMINIACINSFIIYSHNVSSKGEKVQSRKKFMRNLYMGLTSSFMRKRLEAPTLKRYLRDNISNILPKEVPGTSDDSTEEPVMKKRTYCTYCPSKIRRKASASCKKCKKVICREHNIDMCQSCF

SEQ ID NO: 129 - protein, 594 aa, Artificial Sequence
  Modified hyperactive PiggyBac G325A/N347S/S351A/K375A/D450N/S573A/M589V/S592G
MGSSLDDEHILSALLQSDDELVGEDSDSEVSDHVSEDDVQSDTEEAFIDEVHEVQPTSSGSEILDEQNVIEQPGSSLASNRILTLPQRTIRGKNKHCWSTSKPTRRSRVSALNIVRSQRGPTRMCRNIYDPLLCFKLFFTDEIISEIVKWTNAEISLKRRESMTSATFRDTNEDEIYAFFGILVMTAVRKDNHMSTDDLFDRSLSMVYVSVMSRDRFDFLIRCLRMDDKSIRPTLRENDVFTPVRKIWDLFIHQCIQNYTPGAHLTIDEQLLGFRGRCPFRVYIPNKPSKYGIKILMMCDSGTKYMINGMPYLGRGTQTNGVPLAEYYVKELSKPVHGSCRNITCDSWFTAIPLAKNLLQEPYKLTIVGTVRSNAREIPEVLKNSRSRPVGTSMFCFDGPLTLVSYKPKPAKMVYLLSSCDEDASINESTGKPQMVMYYNQTKGGVDTLNQMCSVMTCSRKTNRWPMALLYGMINIACINSFIIYSHNVSSKGEKVQSRKKFMRNLYMGLTSSFMRKRLEAPTLKRYLRDNISNILPKEVPGTSDDSTEEPVMKKRTYCTYCPSKIRRKASAACKKCKKVICREHNIDVCQGCF

SEQ ID NO: 130 - protein, 594 aa, Artificial Sequence
  Modified hyperactive PiggyBac Y177H/R275A/G325A/K375A/D450N/T560A/S564P/S592G
MGSSLDDEHILSALLQSDDELVGEDSDSEVSDHVSEDDVQSDTEEAFIDEVHEVQPTSSGSEILDEQNVIEQPGSSLASNRILTLPQRTIRGKNKHCWSTSKPTRRSRVSALNIVRSQRGPTRMCRNIYDPLLCFKLFFTDEIISEIVKWTNAEISLKRRESMTSATFRDTNEDEIHAFFGILVMTAVRKDNHMSTDDLFDRSLSMVYVSVMSRDRFDFLIRCLRMDDKSIRPTLRENDVFTPVRKIWDLFIHQCIQNYTPGAHLTIDEQLLGFAGRCPFRVYIPNKPSKYGIKILMMCDSGTKYMINGMPYLGRGTQTNGVPLAEYYVKELSKPVHGSCRNITCDNWFTSIPLAKNLLQEPYKLTIVGTVRSNAREIPEVLKNSRSRPVGTSMFCFDGPLTLVSYKPKPAKMVYLLSSCDEDASINESTGKPQMVMYYNQTKGGVDTLNQMCSVMTCSRKTNRWPMALLYGMINIACINSFIIYSHNVSSKGEKVQSRKKFMRNLYMGLTSSFMRKRLEAPTLKRYLRDNISNILPKEVPGTSDDSTEEPVMKKRTYCAYCPGKIRRKASASCKKCKKVICREHNIDMCQGCF

SEQ ID NO: 131 - DNA, 390 bp, Artificial Sequence
  MCP N55K
atggcttcaaactttactcagttcgtgctcgtggacaatggtgggacaggggatgtgacagtggctccttctaatttcgctaatggggtggcagagtggatcagctccaactcacggagccaggcctacaaggtgacatgcagcgtcaggcagtctagtgcccagaagagaaagtataccatcaaggtggaggtccccaaagtggctacccagacagtgggcggagtcgaactgcctgtcgccgcttggaggtcctacctgaacatggagctcactatcccaattttcgctaccaattctgactgtgaactcatcgtgaaggcaatgcaggggctcctcaaagacggtaatcctatcccttccgccatcgccgctaactcaggtatctac

SEQ ID NO: 132 - protein, 130 aa, Artificial Sequence
  MCP N55K
MASNFTQFVLVDNGGTGDVTVAPSNFANGVAEWISSNSRSQAYKVTCSVRQSSAQKRKYTIKVEVPKVATQTVGGVELPVAAWRSYLNMELTIPIFATNSDCELIVKAMQGLLKDGNPIPSAIAANSGIY

SEQ ID NO: 133 - DNA, 162 bp, Artificial Sequence
  gRNA-MS2(tetraloop)-AAVS1-3 spacer
ggggccactagggacaggatgttttagagctaggccaacatgaggatcacccatgtctgcagggcctagcaagttaaaataaggctagtccgttatcaacttggccaacatgaggatcacccatgtctgcagggccaagtggcaccgagtcggtgctttttt

SEQ ID NO: 134 - RNA, 162 nt, Artificial Sequence
  gRNA-MS2(tetraloop)-AAVS1-3 spacer
ggggccacuagggacaggauguuuuagagcuaggccaacaugaggaucacccaugucugcagggccuagcaaguuaaaauaaggcuaguccguuaucaacuuggccaacaugaggaucacccaugucugcagggccaaguggcaccgagucggugcuuuuuu

1. A composition comprising:
a) a first protein comprising or consisting of a site-specific DNA binding protein capable of binding and cleaving a target nucleic acid sequence; or a nucleic acid construct encoding said first protein;
b) a second protein comprising or consisting of a transposase; or a nucleic acid construct encoding said second protein; and
c) a nucleic acid construct comprising a transgene encoding laminin-α2 protein or a functional variant or fragment thereof.

2. The composition according to claim 1, wherein the first and second proteins of a) and b) are fused together.

3. The composition according to claim 1, wherein said nucleic acid construct of c) comprises a promoter selected from the group consisting of: CMV promoter of SEQ ID NO: 76, CAG promoter of SEQ ID NO: 77, EF1-alpha promoter of SEQ ID NO: 78, SV-40 promoter of SEQ ID NO: 79 and EalbAAT promoter of SEQ ID NO: 80.

4. The composition according to claim 1, wherein said nucleic acid construct of c) comprises a splice acceptor of SEQ ID NO: 81.

5. The composition according to claim 1, wherein said nucleic acid construct of c) comprises a poly(A) signal sequence.

6. The composition according to claim 1, wherein said nucleic acid construct of c) is flanked by inverted terminal repeats (ITR).

7. The composition according to claim 1, wherein said nucleic acid construct of c) is comprised in a vector selected from the group consisting of: plasmid vector, a minicircle vector, a doggy bone DNA donor vector, a lentivirus vector and retrovirus vector.

8. The composition according to claim 1, wherein said site-specific DNA binding protein is RNA-guided nuclease comprising a Cas protein, and wherein said composition further comprises a guide RNA including a complementary sequence to a target nucleic acid sequence for integrating said LAMA2 transgene in a specific site of a genome of cell.

9. The composition according to claim 8, wherein the guide RNA comprises any one of SEQ ID NOs: 90 to 97.

10. The composition according to claim 1, wherein said transposase is a modified hyperactive Piggybac transposase or Sleepy Beauty transposase.

11. The composition according to claim 10, wherein said hyperactive PiggyBac transposase is a modified hyperactive PiggyBac transposase comprising at least one mutation of amino acid selected from the group consisting of: V34, T43, Y177, M194, R202, S230, R245, R275, R277, G325, S351, N347, R372, K375, R376, E377, E380, A411, D450, T560, S564, S573, M589, S592, and F594, said position number corresponding to the amino acid number of unmodified hyperactive Piggybac of SEQ ID NO: 9.

12. The composition according to claim 10, wherein said hyperactive PiggyBac transposase is a modified hyperactive PiggyBac transposase comprising at least one mutation of amino acid selected from the group consisting of: M194, R245, R275, R277, G325, R372, K375, R376, E377, E380, D450 and S573, said position number corresponding to the amino acid number of unmodified hyperactive Piggybac of SEQ ID NO: 9.

13. The composition according to claim 1, wherein said transposase is fused N-terminally to said site-specific DNA binding protein by a linker.

14. The composition according to claim 1, wherein said composition is packaged within a nanoparticle.

15. (canceled)

16. An engineered cell, wherein the engineered cell comprises a nucleic acid integrated within its genome, said nucleic acid comprising a transgene encoding laminin-α2 protein flanked by operational sequences for integrase- and/or transposase-mediated gene insertion.

17. The engineered cell according to claim 16, wherein the operational sequences flanking the transgene comprise or consists of SEQ ID NO: 88 and 89.

18. The engineered cell according to claim 16, wherein the inter-ITR size is at least 300 bp.

19. The engineered cell according to claim 16, wherein the transgene encodes the full-length laminin-α2 protein.

20.-21. (canceled)

22. The composition according to claim 13, wherein said linker is a peptidic linker comprising GGS, XTEN or FOKI.

23. A method for treating merosin-deficient congenital muscular dystrophy type 1A (MDC1A) in a subject in need thereof, comprising administering to said subject a therapeutically effective amount of the composition according to claim 1.
